(19) United States
(12) Patent Application Publication
(10) Pub. No.: US 2007/0203060 A1
(43) Pub. Date: Aug. 30, 2007

(54) Casein Derived Peptides And Therapeutic Uses Thereof

(76) Inventor: Zvi Sidelman, Tel Aviv (IL)

Correspondence Address: MINTZ, LEVIN, COHN, FERRIS, GLOVSKY;AND POPEO, P.C., ONE FINANCIAL CENTER, BOSTON, MA, 02111, US

(21) Appl. No.: 10/591,405

(22) PCT Filed:
(86) PCT No.: PCT/IL05/00211

Related U.S. Application Data
(60) Provisional application No. 60/548,401, filed on Mar. 1, 2004.

(51) Int. Cl. A61K 38/17

(52) U.S. Cl. 514/12

(57) ABSTRACT

Biologically active peptides that are derived from or are similar to sequences of the alphaS1-, alphaS2-, beta- or kapa-casein fractions of milk casein. These peptides are capable of immune modulation and other therapeutic activities, including but not limited to stimulating and enhancing immune response, protecting against viral infection, normalizing serum cholesterol levels, and stimulating hematopoiesis. The casein-derived peptides are non-toxic and can be used to treat and prevent immune pathologies, diabetes, hypercholesterolemia, hematological disorders and viral-related diseases.

### FIELD OF THE INVENTION

[0001] The present invention relates to biologically active peptides that are derived from or are similar to sequences of the αS1-, αS2-, β- or κ-casein fractions of milk casein. These peptides are capable of immune modulation and other therapeutic activities, including but not limited to stimulating and enhancing immune response, protecting against viral infection, normalizing serum cholesterol levels, and stimulating hematopoiesis. The casein-derived peptides are non-toxic and can be used to treat and prevent immune pathologies, diabetes, hypercholesterolemia, hematological disorders and viral-related diseases.

### BACKGROUND OF THE INVENTION

[0002] Bioactive Moleculesfrom Nutrients:

[0003] In addition to the nutritional value of many foods, certain fractions and products of digestive pathways possess the ability to influence physiological processes. Some of these “extranutritional” constituents are present in their active form in the whole nutriment, such as the immunoglobulins in mother's milk and colostrums, phytoestrogens found in soy-based foods, polyphenolic antioxidants from fruits and vitamins. Others are encrypted within nutrient molecules, and are released in an active form during digestion or food processing, for example antihypertensive peptides from lactoglobin [Kitts, D. D. (1999), Can. J. Physiol. Pharmacol. 72:4; 423-434].

[0004] Biological Activity in Milk Proteins:

[0005] Milk contains a wide variety of proteins that contribute to it's unique qualities. Some proteins, such as bile-salt stimulated lipase, amylase, beta-casein, lactoferrin, haptocorrin and alpha-antitrypsin assist in digestion and utilization of milk-derived nutrients. Other proteins, such as immunoglobulins, kappa-casein, lyzozyme, lactoferrin and lactalbumin may, in the intact or partially digested form, have immunomodulatory and antimicrobial activity. Casein, the predominant milk protein, has been traditionally defined as composed of three fractions, α, β and γ, according to their electrophoretic mobility [N.J. Hipp, et al. (1952), Dairy Sci., 35:272]. Today casein is defined according to the amino acid sequences of each of the subgroups αS1, αS2, β and κ [W. N. Engel et al. (1984), J. Dairy Sci. 67: 1599].

[0006] In the course of digestion, the casein proteins are subjected to proteolytic cleavage by acid proteases such as chymosin (rennin), trypsin and pepsin, producing shorter peptides and causing curdling and calcium sequestration by the resultant protein fragments. A few studies with milk compounds demonstrated casein-related bacteriocidal activity. U.S. Pat. No. 3,764,670 discloses proteolytic casein digests possessing antibiotic properties against microorganisms. Israel Patent No. 42863 describes a casein-derived peptide consisting of 23 amino acids of the N-terminus of casein, possessing anti-bacterial activity. Shimizu et al. describe a short N-terminal fragment derived from αS1 casein peptic hydrolyzate having emulsifying properties, suggesting that this might be somehow useful to the food industry (Shimizu, et al. J of Food Science, 1984; 49: 1117-20). The authors investigated the amino acid composition of the fragment, it's in-vitro emulsifying activity, and noted that it resembled a 23 amino acid long N-terminal fragment of αS-1, concluding that the fragments were identical. However, no proof of identity was provided, and no biological activity was investigated.

[0007] In another study, Chabance et al. (Biochimie 1998; 80:155-65) detected the presence of casein-derived peptides and peptide fragments in the stomachs and blood of humans after ingestion of yoghurt and milk. The authors reported the presence of fragments of bioactive κ-casein (caseinoglycopeptide) and an N-terminal fragment of αS-1 casein having antibacterial activity, in the blood following digestion. They concluded that the passage of these peptides, unaltered, into the plasma suggests a common, transport pathway for their duodenal absorption. No activity of the peptide fragments was demonstrated.

[0008] Lahov and Regelson describe a brief (30 minutes) chymosin digest of whole, acid-precipitated bovine and human casein, to yield a fraction enriched in an αS-1 casein N-terminal peptide (Lahov and Regelson, Fd Chem Toxic 1996; 34:131-45), essentially duplicating the teachings of U.S. Pat. No. 3,764,670 to Katzir-Katchalsky et al. The chymosin digest was then precipitated with TCA, and characterized by centrifugal analysis and short column equilibrium methods. The authors report an N-terminal αS-1 casein peptide fragment, similar to the anti-bacterial “isracidin” reported by Katzir-Katchalsky et al. However, the veracity of the author's claims to purification to homogeneity are questionable, considering the repeated detection of mixture of peptides reported in detailed studies of chymosin digest of casein employing sensitive analytical techniques (see, for example, Carles et al, FEBS Lett. 1985; 115:282-6; McSweeney et al, J Dairy Res., 1993; 60:401-12, and Yvon, et al. Int. J. Pept. Prot Res, 1989; 34:166-76).

[0009] In addition, other physiologically active properties, such as opioid and growth factor-like activities have been proposed for casein or its derivatives [Kitts, D. D., (1999), ibid.].

[0010] Immune modulating activity has also been observed in casein peptides. Coste et al. [Coste et al. (1992), Immun. Lett. 33: 41-46)] observed enhancement of rat lymphocyte proliferation following treatment with a peptide derived from the C-terminus of β casein. U.S. Pat. Nos. 5,506,209, 5,538,952 and 5,707,968, all to Mukerji et al, teach the administration of human β-casein, recombinant human β-casein, and hydrolysates of both, in a liquid enteral formula, for treating respiratory syncytial virus, otitis media, H. influenza and other infections in infants. Bovine β-casein was tested, but found to lack significant inhibitory activity, leading the authors to conclude that “β-casein from human milk has different bioactivity compared to bovine β-casein”.

[0011] U.S. Pat. Nos. 5,147,853 and 5,344,820 to Dosaka, et al. teach the administration of a sialic-acid conjugated κ-casein and κ-casein-derived glyco-macropeptide (GMP) from cow's milk for prevention of bacterial and viral infections in vitro and in vivo in rats. U.S. Pat. No. 5,330,975 to Isoda, et al. teaches the use of sialic-acid binding κ-casein and κ-casein peptides for the neutralization of bacterial endotoxins, such as cholera toxin. Similarly, U.S. Pat. Nos. 5,712,250 to Mukerji, et al, and 5,968,901 to Andersson, et al, teach the use of human κ-casein, but not bovine κ-casein, for the prevention of bacterial and H. influenza infection. However, these casein compositions taught in the prior art are relatively crude, even following gross fractionation, and none of these studies have determined the specific sequences in these casein peptides which confer their “extranutritional” properties.

[0012] Recent studies have detected a correlation between the consumption of the A1 β-casein fraction of bovine milk and Ischemic Heart Disease (IHD) in many Western countries (see, for example, M. Laugesen, NZ Med J. 2003; 116:U295), leading to development of A1 β-casein-free milk (U.S. Pat. No. 6,570,060 to McLachlan).

[0013] Hematopoiesis in Cancer Therapy:

[0014] Following high-dose chemotherapy, especially following myeloablative doses of chemoradiotherapy supported by autologous bone marrow or peripheral blood stem cell transplantation (ASCT) or allogeneic bone marrow transplantation (BMT), patients are at high risk due to pancytopenia. Granulocytopenia may lead to development of serious, occasionally fatal infectious complications from common bacterial, viral, fugal and parasitic agents in the immediate post transplant period. Similarly, thrombocytopenia frequently results in bleeding tendency and occasionally, in long lasting platelet dependence. Whenever resistance to platelets develops, bleeding episodes can be life threatening and hemorrhagic complications are frequently lethal. The risk due to granulocytopenia can be partially overcome by supportive measures and most effectively by administration of recombinant human cytokines that can enhance reconstitution of granulocytes, particularly granulocyte colony stimulation factor (G-CSF) and granulocyte macrophage colony stimulating factor (GM-CSF). These agents are extremely expensive (approximately $200-400/day/patient) and infrequently cause side effects due to hypersensitivity reactions, fever, bone pain and occasionally vascular leak syndromes, including pericarditis and pleuritis. Some of the side effects may be due to other cytokines that may be intrinsically released by these hematopoietic growth factors. Moreover, the use of these hematopoietic growth factors may be prohibitive in patients with tumor cells bearing G-CSF or GM-CSF receptors such as in acute and chronic myeloid leukemias and in myelodysplastic syndromes. Whereas major progress in treating patients at risk of pancytopenia has been achieved from the use of hematopoietic cytokines, no progress has been made in the treatment of thrombocytopenia. Following high dose chemotherapy and especially following ASCT, patients are at risk for thrombocytopenia which may last for many months even up to 3 years and some thromboctyopenic patients may never recover. Many patients previously treated with multiple blood products become platelet resistant and hence thrombocytopenia may be impossible to overcome, even transiently, despite intensive and frequent platelet transfusions from a single donor. Resistance to platelets and protracted thrombocytopenia represent a common cause of death at ASCT centers worldwide.

[0015] Currently, several new recombinant cytokines such as recombinant human interleukin-3 (rhIL3) and recombinant human interleukin-6 (rhIL6) are being investigated as potential agents for enhancing megakaryocytopoiesis and platelet reconstitution. Unfortunately, preliminary clinical trials showed that although rhIL3 and rhIL6 may enhance platelet reconstitution, such effects are by no means dramatic and may take considerable time.

[0016] Clearly, protracted thrombocytopenia represents a major problem in clinical Bone Marrow Transplant centers today, for which no satisfactory solution has yet been found.

[0017] There is thus a widely recognized need for, and it would be highly advantageous to have a safe, inexpensive, rapidly effective and well-defined stimulator of hematopoiesis, and specifically megakaryocytopoiesis, devoid of the above limitations.

[0018] Thrombopoietin (TPO) in Regulation of Hematopoiesis and Platelet Function:

[0019] TPO appears to be the major regulator of platelet production in vivo, although increase in the kidney- and liver-derived growth factor in platelet deficiencies is not caused by adaptation of TPO biosynthesis in these organs. Rather, a “feed-back loop” seems to exist in which the number of circulating platelets determines how much of the circulating TPO is available to the bone marrow for platelet production. In addition, it has been demonstrated that TPO is an early acting cytokine with important multilineage effects: TPO alone, or in combination with other early acting cytokines, can (i) promote viability and suppress apoptosis in progenitor cells; (ii) regulate hematopoietic stem cell production and function; (iii) trigger cell division of dormant multipotent cells; (iv) induce multilineage differentiation and (v) enhance formation of multilineage colonies containing granulocytes, erythrocytes, macrophages, and megakaryocytes (MK, CFU-GEMM). Moreover, TPO stimulates the production of more limited progenitors for granulocyte/monocyte, megakaryocyte and erythroid colonies, and stimulates adhesion of primitive human bone marrow and megakaryocytic cells to fibronectin and fibrinogen. Thus, TPO is an important cytokine for clinical hematologists/transplanters: for the mobilization, amplification and ex vivo expansion of stem cells and committed precursor cells for autologous and allogeneic transplantation [von dem Borne, A. E. G. Kr., et al., (1998) Thrombopoietin: it's role in platelet disorders and as a new drug in clinical medicine. In Bailliers Clin. Hematol. June: 11(2), 427-45].

[0020] In addition to TPO effects in hematopoiesis, this potent growth factor primes platelets for various agonists and modulates platelet-extracellular matrix interactions. Although it does not itself cause platelet aggregation, TPO upregulates ADP-induced aggregation, especially on the second wave of aggregation, upregulates granule (ADP, ATP, serotonin, etc.) release and production of thromboxane B2, increases platelet attachment to collagen and potentiates shear-induced platelet aggregation. TPO also stimulates PMN activation, inducing IL-8 release and priming oxygen metabolite production, likely enhancing antimicrobial defense.

[0021] Clinical studies suggest TPO's value in understanding and treating a variety of hematological conditions. In patients with idiopathic aplastic anemia (AA), elevated TPO levels persist even in remission following immunosupressive therapy, indicating a hematopoietic defect. TPO is elevated in other forms of aplastic thrombocytopenia as well, but not in conditions of increased platelet destruction. Apparently, the reactive increase in TPO production is insufficient in cases of destructive thrombocytopenia. Thus, TPO is not only a therapeutic option for aplastic, but also for destructive thrombocytopenia.

[0022] Thrombopoietic agents are of great clinical interest, for prevention and/or treatment of pathological or treatment-induced thrombocytopenia, and as a substitute for platelet transfusions. Of the cytokines evaluated, all but the marginally potent IL-11 have been deemed unacceptable for clinical use. TPO is widely believed to become the cytokine of choice for throbocytopenia treatment. Recombinant human TPO (Genentech) has recently become available, enabling accurate pharmacokinetic determinations and clinical trials. Thus, TPO's potential applications encompass the realms of supportive care (post chemo/radio-therapy, bone marrow and stem cell transplantation), hematological disease (AA, myelodysplasia, congenital and acquired thrombocytopenia), liver diseases, transfusion (expansion, harvest, mobilization and storage of platelets) and surgery (including liver trans plantation). Of particular interest is the potential use of TPO/EPO/G-CSF cocktail for myelodysplasia, G-CSF and TPO combination for peripheral stem cell mobilization and TPO in harvesting CD 34+ cells and ex vivo expansion of megakaryocytes for superior platelet reconstitution. Recombinant human G-CSF is also available (Filgrastim, Amgen, Inc. USA). However, similar to other hematopoietic agents under consideration for clinical application, TPO and G-CSF are costly and potentially antigenic at therapeutically effective levels. Thus, it would be advantageous to have a safe, inexpensive and readily available stimulator of thrombopoiesis and granulocytopoiesis capable of augmenting TPO and G-CSF activity.

[0023] SARS:

[0024] The worldwide outbreak of severe acute respiratory syndrome (SARS), and reported SARS-related deaths in more than 25 countries in the spring of 2003 have focused attention on the suspected infective agent, the SARS-CoV coronavirus (Rota et al, Sciencexpress 1 May 2003). Evidence of SARS-CoV infection has been documented in SARS patients throughout the world, SARS-CoV infection has been detected in respiratory specimens, and convalescent-phase serum from SARS patients contains anti-SARS antibodies. Presently, no therapies have been identified for the prevention or treatment of SARS-CoV infection.

[0025] In the absence of effective vaccines or drugs, the current SARS epidemic threatens to reach devastating proportions, similar to epidemics of other infectious diseases spread by respiratory route such as the influenza epidemic of 1918 and measles epidemics. As has been emphatically stated by many health officials, the key to controlling epidemics is the blockage of transmission of infection. Thus, in addition to much needed public health measures, the development of methods for prevention and/or treatment of SARS is of foremost importance.

[0026] The α, κ-, and β-Fractions of Casein:

[0027] The αS1 fraction of casein can be obtained from milk proteins by various methods [D. G. Schmidth and T. A. J. Paynes (1963), Biochim., Biophys. Acta, 78:492; M. P. Thompson and C. A. Kiddy (1964), J. Dairy Sci., 47:626; J. C. Mercier, et al. (1968), Bull. Soc. Chim. Biol. 50:521], and the complete amino acid sequence of the αS1 fraction of casein was determined by J. C. Mercier et al. (1971) (Eur. J. Biochem. 23:41). The genomic and coding sequences of bovine αS1 fraction of casein have also been cloned and sequenced employing recombinant DNA techniques [D. Koczan, et al. (1991), Nucl. Acids Res. 19(20): 5591; McKnight, R. A., et al. (1989), J. Dairy Sci. 72:2464-73]. Proteolytic cleavage and identification of N-terminal fragments from the αS1 fraction of casein has been documented [J. C. Mercier, et al. (1970), Eur. J. Biochem. 16:439; P. L. H. McSweeney et al. (1993), J. Dairy Res., 60:401], as has the intestinal absorption and appearance of this fragment in mammalian plasma following ingestion of whole milk proteins [Fiat, A. M., et al. (1998) Biochimie, 80(2):2155-65]. Meisel, H. and Bockelmann, W. [(1999), Antonie Van Leeuwenhoek, 76:207-15] detected amino acid sequences of immunopeptides, casokinins and casomorphins in peptides liberated by lactic acid bacteria digests of α and β casein fractions. Of particular interest is the anti-aggregating and thrombolytic activity demonstrated for C-terminal portions of the α- and κ-casein fractions [Chabance, B. et al. (1997), Biochem. Mol. Biol. Int. 42(1) 77-84; Fiat AM. et al. (1993), J. Dairy Sci. 76(1): 301-310].

[0028] The coding sequences for bovine αS2-, β and κ-casein have also been cloned (Groenen et al, Gene 1993; 123:187-93, Stewart, et al, Mol. Biol. Evol. 1987:4:231-41, and Stewart, et al, Nucl Acids Res 1984; 12:3895-907). The αS2-casein coding sequence has numerous Alu-like retroposon sequences, and, although the gene is organized similarly to the αS1-casein gene, sequence analysis indicates that it is more closely related to the β-casein-encoding gene. β-casein is characterized by numerous clusters of serine residues, which, when phosphorylated, can interact with and sequester calcium phosphate (Stewart et al, Mol Biol Evol. 1987; 4:231-43). κ-casein is a smaller polypeptide, the amino acid and nucleotide sequence of which (Alexander et al, Eu. J. Biochem 1988; 178:395-401) indicates that it is evolutionarily unrelated to the calcium-sensitive casein gene family. In the gut, κ-casein is split into an insoluble peptide (para-kappa casein) and a soluble hydrophilic glycopeptide (caseinomacropeptide), which has been shown to be active in efficiency of digestion, prevention of neonate hypersensitivity to ingested proteins, and inhibition of gastric bacterial pathogens (Malkoski, et al, Antimicrob Agents Chemother, 2001; 45:2309-15).

[0029] Previous studies have documented potential bioactive peptides encrypted in the N-terminal αS1 casein, the αS2-casein, β-casein and in the κ-casein amino acid sequences, but no mention was made of use of these protein fragments, specific sequences or defined synthetic peptides, alone or in combination, to enhance hematopoiesis, prevent viral infection or modulate the development of autoimmune diseases.

[0030] The present invention successfully addresses the shortcomings of the presently known art by providing peptides, and combinations thereof for the treatment of human disease, which peptides are derived from the N terminus portion of αS1 casein, αS2-casein, β-casein and κ-casein, alone or in combination, and posses no detectable toxicity and a high therapeutic efficacy in a broad variety of pathological indications.

### SUMMARY OF THE INVENTION

[0031] According to one aspect of the present invention there is provided a method of preventing or treating an autoimmune or infectious disease or condition, the method effected by administering to a subject in need thereof a therapeutically effective amount of a peptide derived from α-, β-, or κ-casein or combination thereof.

[0032] According to further features in preferred embodiments of the invention described below the autoimmune or infectious disease or condition is selected from the group consisting of a viral disease, a viral infection, AIDS, and infection by HIV.

[0033] According to another aspect of the present invention there is provided a method of preventing or treating a blood disease or condition, the method effected by administering to a subject in need thereof a therapeutically effective amount of a peptide derived from α-, β-, or κ-casein or combination thereof.

[0034] According to further features in preferred embodiments of the invention described below the blood disease or condition is selected from the group consisting of thrombocytopenia, pancytopenia, granulocytopenia, an erythropoietin treatable condition, and a thrombopoietin treatable condition.

[0035] According to a yet another aspect of the present invention there is provided a method of modulating blood cell formation, the method effected by administering to a subject in need thereof a therapeutically effective amount of a peptide derived from α-, β- or κ-casein or combination thereof.

[0036] According to further features in preferred embodiments of the invention described below the modulating blood cell formation is selected from the group consisting of inducing hematopoiesis, inducing hematopoietic stem cells proliferation, inducing hematopoietic stem cells proliferation and differentiation, inducing megakaryocytopoiesis, inducing erythropoiesis, inducing leukocytopoiesis, inducing thrombocytopoiesis, inducing plasma cell proliferation, inducing dendritic cell proliferation and inducing macrophage proliferation.

[0037] According to still another aspect of the present invention there is provided a method of enhancing peripheral stem cell mobilization, the method effected by administering to a subject in need thereof a therapeutically effective amount of a peptide derived from α-, β- or κ-casein or combination thereof.

[0038] According to another aspect of the present invention there is provided a method of preventing or treating a metabolic disease or condition, the method effected by administering to a subject in need thereof a therapeutically effective amount of a peptide derived from α-, β- or κ-casein or combination thereof.

[0039] According to further features in preferred embodiments of the invention described below the metabolic disease or condition is selected from the group consisting of NIDDM, IDDM, glucosuria, hyperglycemia, hyperlipidemia, and hypercholesterolemia.

[0040] According to another aspect of the present invention there is provided a method of preventing or treating conditions associated with myeloablative doses of chemoradiotherapy supported by autologous bone marrow or peripheral blood stem cell transplantation (ASCT) or allogeneic bone marrow transplantation (BMT), the method effected by administering to a subject in need thereof a therapeutically effective amount of a peptide derived from α-, β- or κ-casein or combination thereof.

[0041] According to yet another aspect of the present invention there is provided a method of augmenting the effect of a blood cell stimulating factor, the method effected by administering to a subject in need thereof a therapeutically effective amount of a peptide derived from α-, β- or κ-casein or combination thereof.

[0042] According to further features in preferred embodiments of the invention described below the blood cell stimulating factor is selected from the group consisting of thrombopoietin, erythropoietin and granulocyte colony stimulating factor (G-CSF).

[0043] According to still another aspect of the present invention there is provided a method of enhancing colonization of donated blood stem cells in a myeloablated recipient, the method effected by treating a donor of the donated blood stem cells with a therapeutically effective amount of peptide derived from α-, β- or κ-casein or combination thereof prior to donation and implanting the donated blood stem cells in the recipient.

[0044] According to further features in preferred embodiments of the invention described below the method further comprising treating the donated blood cells with a blood cell stimulating factor, the blood cell stimulating factor selected from the group consisting of thrombopoietin, erythropoietin and granulocyte colony stimulating factor (G-CSF) prior to implanting the blood stem cells in the recipient.

[0045] According to yet another aspect of the present invention there is provided a method of enhancing colonization of donated blood stem cells in a myeloablated recipient, the method effected by treating the donated blood stem cells with a therapeutically effective amount of peptide derived from α-, β- or κ-casein or combination thereof prior to implanting the donated blood stem cells in the recipient.

[0046] According to further features in preferred embodiments of the invention described below the method further comprising treating the donor with a blood cell stimulating factor, the blood cell stimulating factor selected from the group consisting of thrombopoietin, erythropoietin and granulocyte colony stimulating factor (G-CSF) prior to donation and implanting the blood stem cells in the recipient.

[0047] According to still another aspect of the present invention there is provided a method of enhancing colonization of blood stem cells in a myeloablated recipient, the method effected by treating the blood stem cells with a peptide derived from α-, β- or κ-casein or combination thereof prior to implanting the blood stem cells in the recipient.

[0048] According to further features in preferred embodiments of the invention described below the method further comprising treating the blood stem cells with a blood cell stimulating factor, the blood cell stimulating factor selected from the group consisting of thrombopoietin, erythropoietin and granulocyte colony stimulating factor (G-CSF) prior to implanting the blood stem cells in the recipient.

[0049] According to another aspect of the present invention there is provided a method for preventing or treating a condition associated with a SARS infective agent, the method effected by administering to a subject in need thereof a therapeutically effective amount of a peptide derived from α-, β- or κ-casein or combination thereof.

[0050] According to further features in preferred embodiments of the invention described below the SARS infective agent is a coronavirus.

[0051] According to further features in preferred embodiments of the invention described below the coronavirus is SARS-CoV.

[0052] According to another aspect of the present invention there is provided a method for preventing or treating a bacterial disease or condition, the method effected by administering to a subject in need thereof a therapeutically effective amount of a peptide derived from α-, β- or κ-casein or combination thereof.

[0053] According to further features in preferred embodiments of the invention described below the peptide is a fragment derived from by fragmentation of αS1 casein.

[0054] According to yet further features in preferred embodiments of the invention described below the peptide derived from α-, β- or κ-casein or combination thereof is a synthetic peptide.

[0055] According to still further features in preferred embodiments of the invention described below the peptide derived from α-, β- or κ-casein or combination thereof has a sequence as set forth in one of SEQ ID NOs: 1-33.

[0056] According to further features in preferred embodiments of the invention described below the combinantion of peptides derived from α-, β- or κ-casein or combination thereof is a mixture of peptides.

[0057] According to yet further features in preferred embodiments of the invention described below the combination of peptides derived from α-, β- or κ-casein is a chimeric peptide comprising at least two peptides derived from α-, β- or κ-casein in covalent linkage.

[0058] According to still further features in preferred embodiments of the invention described below the chimeric peptide comprises a first αS1 casein peptide having a sequence as set forth in one of SEQ ID NOs: 1-25 covalently linked to a second casein peptide having a sequence as set forth in any of SEQ ID Nos: 1-33 and 434-4000.

[0059] According to further features in preferred embodiments of the invention described below the method further comprising administering to the subject in need thereof an effective amount of a blood cell stimulating factor, the blood cell stimulating factor selected from the group consisting of thrombopoietin, erythropoietin and granulocyte colony stimulating factor (G-CSF).

[0060] According to further features in preferred embodiments of the invention described below the method further comprising administering to the subject in need thereof an effective amount of erythropoietin, thrombopoietin or granulocyte colony stimulating factor (G-CSF).

[0061] According to one aspect of the present invention there is provided a pharmaceutical composition for preventing or treating an autoimmune or infectious disease or condition, the pharmaceutical composition comprising, as an active ingredient, a peptide derived from the N terminus portion of αS1 casein and a pharmaceutically acceptable carrier.

[0062] According to further features in preferred embodiments of the invention described below the autoimmune or infectious disease or condition is selected from the group consisting of a viral disease, a viral infection, AIDS, and infection by HIV.

[0063] According to another aspect of the present invention there is provided a pharmaceutical composition for preventing or treating a blood disease or condition, the pharmaceutical composition comprising, as an active ingredient, a peptide derived from α-, β- or κ-casein or combination thereof and a pharmaceutically acceptable carrier.

[0064] According to further features in preferred embodiments of the invention described below the blood disease or condition is selected from the group consisting of thrombocytopenia, pancytopenia, granulocytopenia, an erythropoietin treatable condition, and a thrombopoietin treatable condition and a granulocyte colony stimulating factor treatable condition.

[0065] According to yet another aspect of the present invention there is provided a pharmaceutical composition for modulating blood cell formation, the pharmaceutical composition comprising, as an active ingredient, a peptide derived from α-, β- or κ-casein or combination thereof and a pharmaceutically acceptable carrier.

[0066] According to further features in preferred embodiments of the invention described below, modulating blood cell formation is selected from the group consisting of inducing hematopoiesis, inducing hematopoietic stem cells proliferation, inducing hematopoietic stem cells proliferation and differentiation, inducing megakaryocytopoiesis, inducing erythropoiesis, inducing leukocytopoiesis, inducing thrombocytopoiesis, inducing granulocytopoiesis, inducing plasma cell proliferation, inducing dendritic cell proliferation and inducing macrophage proliferation.

[0067] According to still another aspect of the present invention there is provided a pharmaceutical composition for enhancing peripheral stem cell mobilization, the pharmaceutical composition comprising, as an active ingredient, a therapeutically effective amount of a peptide derived from α-, β- or κ-casein or combination thereof and a pharmaceutically acceptable carrier.

[0068] According to another aspect of the present invention there is provided a pharmaceutical composition for preventing or treating a metabolic disease or condition, the pharmaceutical composition comprising, as an active ingredient, a peptide derived from α-, β- or κ-casein or combination thereof and a pharmaceutically acceptable carrier.

[0069] According to further features in preferred embodiments of the invention described below the metabolic disease or condition is selected from the group consisting of NIDDM, IDDM, glucosuria, hyperglycemia, hyperlipidemia, and hypercholesterolemia.

[0070] According to yet another aspect of the present invention there is provided a pharmaceutical composition for preventing or treating conditions associated with myeloablative doses of chemoradiotherapy supported by autologous bone marrow or peripheral blood stem cell transplantation (ASCT) or allogeneic bone marrow transplantation (BMT), the pharmaceutical composition comprising, as an active ingredient, a peptide derived from α-, β- or κ-casein or combination thereof and a pharmaceutically acceptable carrier.

[0071] According to still another aspect of the present invention there is provided a pharmaceutical composition for augmenting the effect of a blood cell stimulating factor, the pharmaceutical composition comprising, as an active ingredient, a peptide derived from α-, β- or κ-casein or combination thereof and a pharmaceutically acceptable carrier.

[0072] According to further features of preferred embodiments in the invention described below, the blood cell stimulating factor is selected from the group consisting of thrombopoietin, erythropoietin and granulocyte colony stimulating factor (G-CSF).

[0073] According to another aspect of the present invention there is provided a pharmaceutical composition for enhancing colonization of donated blood stem cells in a myeloablated recipient, the pharmaceutical composition comprising, as active ingredients, a peptide derived from α-, β- or κ-casein or combination thereof and a pharmaceutically acceptable carrier.

[0074] According to yet another aspect of the present invention there is provided a pharmaceutical composition for enhancing colonization of blood stem cells in a myeloablated recipient, the pharmaceutical composition comprising as active ingredients, a peptide derived from α-, β- or κ-casein or combination thereof and a pharmaceutically acceptable carrier.

[0075] According to still another aspect of the present invention there is provided a pharmaceutical composition for treating or preventing an indication selected from the group consisting of autoimmune disease or condition, viral disease, viral infection, hematological disease, hematological deficiencies, thrombocytopenia, pancytopenia, granulocytopenia, hyperlipidemia, hypercholesterolemia, glucosuria, hyperglycemia, diabetes, AIDS, HIV-1, helper T-cell disorders, dendrite cell deficiencies, macrophage deficiencies, hematopoietic stem cell disorders including platelet, lymphocyte, plasma cell and neutrophil disorders, pre-leukemic conditions, leukemic conditions, immune system disorders resulting from chemotherapy or radiation therapy, human immune system disorders resulting from treatment of diseases of immune deficiency and bacterial infections, the pharmaceutical composition comprising, as an active ingredient, a peptide derived from α-, β- or κ-casein or combination thereof and a pharmaceutically acceptable carrier.

[0076] According to another aspect of the present invention there is provided a pharmaceutical composition for treating or preventing an indication selected from the group consisting of hematological disease, hematological deficiencies, thrombocytopenia, pancytopenia, granulocytopenia, dendrite cell deficiencies, macrophage deficiencies, hematopoietic stem cell disorders including platelet, lymphocyte, plasma cell and neutrophil disorders, pre-leukemic conditions, leukemic conditions, myelodysplastic syndrome, non-myeloid malignancies, aplastic anemia and bone marrow insufficiency, the pharmaceutical composition comprising, as active ingredients, a blood cell stimulating factor and a peptide derived from α-, β- or κ-casein or combination thereof and a pharmaceutically acceptable carrier.

[0077] According to one aspect of the present invention there is provided a purified peptide having an amino acid sequence selected from the group consisting of SEQ ID NOs: 1-33.

[0078] According to another aspect of the present invention there is provided a pharmaceutical composition comprising a purified peptide having an amino acid sequence selected from the group consisting of SEQ ID NOs: 1-33 and a pharmaceutically acceptable carrier.

[0079] According to another aspect of the present invention there is provided a purified chimeric peptide comprising at least two peptides derived from α-, β- or κ-casein in covalent linkage.

[0080] According to yet another aspect of the present invention there is provided a pharmaceutical composition comprising a purified chimeric peptide comprising at least two peptides derived from α-, β- or κ-casein in covalent linkage and a pharmaceutically acceptable carrier.

[0081] According to further features in preferred embodiments of the invention described below, the chimeric peptide comprising a first αS1 casein peptide having a sequence as set forth in one of SEQ ID NOs: 1-25 covalently linked to a second casein peptide having a sequence as set forth in any of SEQ ID Nos: 1-33 and 434-4000.

[0082] According to yet another aspect of the present invention there is provided a pharmaceutical composition comprising a blood cell stimulating factor, said blood cell stimulating factor selected from the group consisting of thrombopoietin, erythropoietin and granulocyte colony stimulating factor (G-CSF), in combination with a purified peptide having an amino acid sequence selected from the group consisting of SEQ ID NOs: 1-33 and a pharmaceutically acceptable carrier.

[0083] According to still another aspect of the present invention there is provided a pharmaceutical composition for preventing or treating a condition associated with a SARS infective agent, the pharmaceutical composition comprising, as an active ingredient, a peptide derived from α-, β- or κ-casein or combination thereof and a pharmaceutically acceptable carrier.

[0084] According to further features in preferred embodiments of the invention described below the SARS infective agent is a coronavirus.

[0085] According to still further features in preferred embodiments of the invention described below the coronavirus is SARS-CoV.

[0086] According to another aspect of the present invention there is provided a pharmaceutical composition for preventing or treating a bacterial infection the pharmaceutical composition comprising, as an active ingredient, a peptide derived from α-, β- or κ-casein or combination thereof and a pharmaceutically acceptable carrier.

[0087] According to further features in preferred embodiments of the invention described below the peptide is a fragment derived from the N terminus portion of αS1 casein by fragmentation of αS1 casein.

[0088] According to yet further features in preferred embodiments of the invention described below the peptide derived from α-, β- or κ-casein or combination thereof is a synthetic peptide.

[0089] According to still further features in preferred embodiments of the invention described below the peptide derived from α-, β- or κ-casein or has a sequence as set forth in one of SEQ ID NOs: 1-33.

[0090] According to further features in preferred embodiments of the invention described below the combinantion of peptides derived from α-, β- or κ-casein is a mixture of peptides.

[0091] According to further features in preferred embodiments of the invention described below the combination of peptides derived from α-, β- or κ-casein is a chimeric peptide comprising at least two peptides derived from α-, β- or κ-casein in covalent linkage.

[0092] According to yet further features in preferred embodiments of the invention described below the chimeric peptide comprises a first αS1 casein peptide having a sequence as set forth in one of SEQ ID NOs: 1-25 covalently linked to a second casein peptide having a sequence as set forth in any of SEQ ID Nos: 1-33 and 434-4000.

[0093] According to still further features in preferred embodiments of the invention described below the pharmaceutical composition further comprising, as an active ingredient, a blood cell stimulating factor, the blood cell stimulating factor selected from the group consisting of thrombopoietin, erythropoietin and granulocyte colony stimulating factor (G-CSF).

[0094] According to further features in preferred embodiments of the invention described below the pharmaceutical composition further comprising, as an active ingredient, thrombopoietin, erythropoietin or granulocyte colony stimulating factor (G-CSF).

[0095] According to still another aspect of the present invention there is provided a method of low-temperature processing of casein proteolytic hydrolysate, the method effected by obtaining a casein proteolytic hydrolysate comprising proteolytic enzymes, cooling the casein proteolytic hydrolysate so as to inactivate the proteolytic enzymes, adjusting the pH of the casein protein hydrolysate to an acid pH, filtering the acidic casein protein hydrolysate, collecting the filtrate, and further acidifying the filtrate so as to precipitate proteins derived from natural casein, separating and collecting the precipitate, adjusting the pH of the precipitate to an alkaline pH so as to irreversibly inactivate the proteolytic enzymes; and adjusting the pH of the precipitate to pH 7-9, thereby processing the casein protein hydrolysate at low temperature.

[0096] According to another aspect of the present invention there is provided a casein protein hydrolysate processed at low temperature according to the abovementioned method.

[0097] According to further features in preferred embodiments of the invention described below, step b comprises cooling to about 10° C.

[0098] According to still further features in preferred embodiments of the invention described below adjusting the pH of step c comprises addition of acid to 2% (w/v) acid, and the further acidifying the filtrate of step d comprises additional addition of acid to about 10% (w/v) acid.

[0099] According to yet further features in preferred embodiments of the invention described below the alkaline pH of step f is at least pH 9.

[0100] The present invention successfully addresses the shortcomings of the presently known configurations by providing peptides for the treatment of human disease, which peptides are derived from the N terminus portion of αS1 casein, αS2-casein, β-casein and κ-casein, alone or in combination and posses no detectable toxicity and high therapeutic efficacy.

### BRIEF DESCRIPTION OF THE DRAWINGS

[0101] The invention is herein described, by way of example only, with reference to the accompanying drawings. With specific reference now to the drawings in detail, it is stressed that the particulars shown are by way of example and for purposes of illustrative discussion of the preferred embodiments of the present invention only, and are presented in the cause of providing what is believed to be the most useful and readily understood description of the principles and conceptual aspects of the invention. In this regard, no attempt is made to show structural details of the invention in more detail than is necessary for a fundamental understanding of the invention, the description taken with the drawings making apparent to those skilled in the art how the several forms of the invention may be embodied in practice.

[0102] In the drawings:

[0103] FIG. 1 depicts the stimulation of Natural Killer (NK) cell activity in cultured murine bone marrow cells by peptides derived from natural casein. Lysis of ³⁵S labeled YAC target cells by cultured murine bone marrow cells incubated in the presence or absence of 100 μg per ml peptides derived from natural casein is expressed as the fraction of total radioactivity released from the YAC cells into the culture supernatant (% Release ³⁵S). FIG. 1 represents NK activity at an effector:target cell ratio of 25:1 and 50:1.

[0104] FIGS. 2a and 2b depict the stimulation of Natural Killer (NK) cell activity in cultured human Peripheral Blood Stem Cells (PBSC) by peptides derived from natural casein. Lysis of ³⁵S labeled K562 target cells by cultured human PBSC from Granulocyte Colony Stimulating Factor (G-CSF) treated donors incubated without (0 μg) or with increasing concentrations (5-500 μg per ml) of peptides derived from natural casein is expressed as the fraction of total radioactivity released from the K562 cells into the culture supernatant (% Release ³⁵S). FIG. 2a represents NK activity of two blood samples from the same patient, incubated at different effector:target cell ratios (100:1 and 50:1). FIG. 2b represents NK activity of blood samples from normal and affected donors incubated at a 100:1 effector:target cell ratio. Squares represent an effector:target cell ratio of 100:1, diamonds represent an effector:target cell ratio of 50:1.

[0105] FIGS. 3a-3c depict the stimulation of proliferation of Natural Killer (NK) and T-lymphocyte (T) cells from cultured human Peripheral Blood Stem Cells (PBSC) by peptides derived from natural casein. NK and T cell proliferation in cultured PBSC from Granulocyte Colony Stimulating Factor treated donors incubated with or without peptides derived from natural casein is expressed as the percentage (%) of cells binding the anti-CD₃/FITC fluorescent anti-T cell antibody UCHT₁, or the anti CD₅₆/RPE fluorescent anti-NK cell antibody MOC-1 (DAKO A/S Denmark). Controls are FITC and RPE-conjugated anti-mouse IgG antibody. FIG. 3a represents the percentage of cultured human PBSC binding fluorescent antibody CD₅₆ (5 independent samples) after 10 days incubation with (peptides) or without (control) 100 μg per ml peptides derived from natural casein. FIG. 3b represents the percentage of cultured human PBSCs binding fluorescent anti-CD₃ (T cell) antibody, following 14 days of incubation with (peptides) or without (control) 100 μg per ml peptides derived from natural casein. FIG. 3c represents the percentage of cultured human PBSCs binding fluorescent anti-CD₃ (T cell) antibody and cells binding both CD₃ and CD₅₆ (T and NK-like cells) antibodies after 28 days incubation with (peptides) or without (control) 100 μg per ml peptides derived from natural casein.

[0106] FIG. 4 depicts the stimulation of Natural Killer (NK) cell activity in cultured human Peripheral Blood Stem Cells (PBSC) by synthetic peptides derived from αS1-casein. Lysis of ³⁵S labeled K562 target cells by cultured human PBSC (from a breast cancer patient) incubated without (0 μg) or with increasing concentrations (10-500 μg per ml) of synthetic peptides derived from casein is expressed as the fraction of total radioactivity released from the K562 cells into the culture supernatant (% Release). Peptides represent N-terminal sequences of 1-10 (1a, diamonds), 1-11 (2a, squares) and 1-12 (3a, triangles) first amino acids of the N terminus portion of αS1 casein (see Table 3 below for sequences of synthetic peptides).

[0107] FIGS. 5a-5c depict the stimulation of proliferation of cultured human cells of diverse origin by peptides derived from natural casein. Proliferation of the cultured human cells after 14-21 days incubation with increasing concentrations of the peptides derived from natural casein is expressed as the amount of [³H]-thymidine incorporated into each sample. FIG. 5a represents the incorporation of label into two samples (PBSC 1, squares, 15 days incubation; and PBSC 2, diamonds, 20 days incubation) of human Peripheral Blood Stem Cells incubated with or without (ctrl) 50-600 μg per ml peptides derived from natural casein. FIG. 5b represents the incorporation of [³H]-thymidine into cultured human bone marrow cells after 21 days incubation with or without (ctrl) 50-600 μg per ml peptides derived from natural casein. Bone marrow was donated by cancer patients in remission (BM Auto, closed squares, BM 1, triangles, and BM 2,-open squares-) or healthy volunteers (BM normal, diamonds). FIG. 5c represents incorporation of [³H]-thymidine into cultured human Cord Blood cells after 14 days incubation with or without (ctrl) 50-1000 μg per ml peptides derived from natural casein. Cord blood cells were donated by two separate donors (C.B. 1, triangles, C.B. 2, squares).

[0108] FIG. 6 shows a Table depicting the proliferation of blood cell progenitors from human bone marrow and cord blood in response to incubation with peptides derived from natural casein. The relative cell number×10⁴ per ml, reflecting the proliferation of cultured cells, was determined by counting cells as described in the Examples section that follows. Bone marrow from healthy volunteers (Bone Marrow) and Cord Blood from normal births (Cord Blood) was incubated for 13 (Cord Blood) or 14 (Bone Marrow) days in the presence of growth factors and AB serum, with or without increasing concentrations of peptides derived from natural casein (25-500 μg/ml).

[0109] FIG. 7 shows a table depicting the effect of in-vitro incubation with synthetic peptides derived from αS1-casein on the relative distribution of Megakaryocyte, Erythroid, Plasma and Dendritic cells (differential count) in CFU-GEMM colonies from murine bone marrow progenitor cells. Cells were scored in the macroscopic colonies grown from murine bone marrow cells prepared similarly to the CFU-GEMM colonies. Cells were incubated with hematopoietic factors, and 25 μg or more of Synthetic peptides derived from casein, for 14 days. The differential count is expressed as the percentage of total cells represented by individual cell types.

[0110] FIG. 8 depicts the stimulation of peripheral white blood cell reconstitution in myeloablated, bone marrow transplanted mice in response to treatment with peptides derived from natural casein. Cell counts represent the number of white blood cells (×10⁴ per ml, as counted in a haemocytometer). The mice (n=6 per group) received sub-lethal irradiation and syngeneic bone marrow transplantation (10⁶ cells per mouse) on the following day, and intravenous administration of 1 mg per recipient peptides derived from natural casein (peptides: squares) or 1 mg per recipient human serum albumin (CONTROL: diamonds) one day later.

[0111] FIG. 9 depicts the stimulation of platelet reconstitution in myeloablated, bone marrow transplanted mice in response to treatment with peptides derived from natural casein. Platelet (PLT) counts represent the number of thrombocytes (×10⁶ per ml, as counted in a haemocytometer). The mice (n=7 or 10 per group) received lethal irradiation and syngeneic bone marrow transplantation (10⁶ cells per mouse) on day 1, and intravenous administration of 1 mg per recipient peptides derived from natural casein (Peptides, diamonds) or 1 mg per recipient human serum albumin (control, squares).

[0112] FIGS. 10a-10f depict the penetration and nuclear uptake of FITC-conjugated peptides derived from: natural casein in cultured human T-lymphocyte cells, as recorded by fluorescent microscopy. Sup-T₁ cells were incubated with 100 μg per ml FITC-conjugated peptides derived from natural casein as described in the Examples section that follows. At the indicated times, the cells were washed of free label, fixed in formalin and prepared for viewing and recording by Laser Scanning Confocal Microscopy. FIGS. 10a through 10f are selected images of cells from consecutive incubation times, demonstrating FITC-conjugated peptides derived from natural casein penetrating the Sup-T₁ cell membrane (FIGS. 10a, 10b) and concentrating in the nucleus (FIGS. 10c-10f).

[0113] FIG. 11 shows a Table depicting the stimulation of Sup-T₁ Lymphocyte cell proliferation in response to incubation with peptides derived from natural casein. Sup-T₁ cells (5000 per well) were incubated with increasing concentrations (50-1000 μg per ml) of peptides derived from natural casein, counted in their wells at the indicated times post culture and pulsed with [³H]-thymidine for 18 hours. Proliferation index is the ratio of the average of the incorporation of [³H]-thymidine into cells cultured with peptides derived from natural casein (triplicate samples) divided by the incorporation into cells cultured without peptides derived from natural casein (control).

[0114] FIG. 12 shows a Table depicting inhibition of HIV-1 infection of CEM lymphocytes by peptides derived from natural casein. CEM cells were either contacted with HIV-1 virus preincubated 3 hours with peptides derived from natural casein (3 hours), or preincubated themselves with increasing concentrations (50-1000 μg per ml) of peptides derived from natural casein for the indicated number of hours (24 and 48 hours) before contact with HIV-1 virus, as described in the Examples section that follows. On day 15 post infection, cells were counted for cell numbers and assayed for severity of HIV-1 infection by the P²⁴ antigen assay, as described in the Examples section that follows. Control cultures were IF: CEM cells contacted with HIV-1 virus without pretreatment with peptides derived from natural casein, and UIF: CEM cells cultured under identical conditions without peptides derived from natural casein and without contact with HIV-1 virus.

[0115] FIG. 13 shows a Table depicting inhibition of HIV-1 infection of CEM lymphocytes by synthetic peptides derived from αS1-casein. CEM cells were contacted with HIV-1 virus which had been preincubated with various concentrations (10-500 μg per ml) of synthetic peptides derived from αS1-casein (1P, 3P and 4P) for 3 hours (in the presence of the peptides), as described in the Examples section that follows. On day 7 post infection, cells were counted for cell numbers and assayed for severity of HIV-1 infection by the P²⁴ antigen assay, as described in the Examples section that follows. Control cultures (IF) were CEM cells contacted with HIV-1 virus without pretreatment with synthetic peptides derived from αS1-casein, and UIF: CEM cells cultured under identical conditions without synthetic peptides derived from casein and without contact with HIV-1 virus.

[0116] FIG. 14 depicts the prevention by peptides derived from natural casein of Type I (IDDM) Diabetes in female Non Obese Diabetic (NOD) mice. Glucosuria was monitored at intervals during 365 days post treatment in female NOD mice receiving a once (triangles) or twice (squares) weekly injection of 100 μg peptides derived from natural casein for 5 weeks (5 or 10 injections total) and untreated controls. All the controls developed glucosuria and subsequently died.

[0117] FIG. 15 depicts the reduction by synthetic peptides derived from αS1-casein of diet-induced hypercholesterol/hyperlipidemia in female C57B1/6 mice. Total cholesterol (TC), High Density (HDL) and Low Density Lipoproteins (LDL) were assayed in pooled blood of two (2) mice per sample from hypercholesterol/hyperlipidemic mice receiving (IP) casein-derived peptides B, C, 2a or 3P, or no treatment (control). “Normal” samples represent control mice not fed the atherogenic diet.

[0118] FIG. 16 shows a Table depicting the stimulation of hematopoiesis in cancer patients in response to injections of peptides derived from natural casein. Peripheral blood from five female cancer patients either receiving or having received chemotherapy, as described above, was counted for total White Blood Cells (WBC, ×10³), Platelets (PLT, ×10⁶), Erythrocytes (RBC, ×10³) and Hemoglobin (gm per dl) before (n) and after (n+ . . . ) intramuscular injections with peptides derived from natural casein. Patient 1 relates to G.T.; patient 2 relates to E.C.; patient 3 relates to E.S.; patient 4 relates to J.R. and patient 5 relates to D.M.

[0119] FIG. 17 depicts the stimulation by peptides derived from natural casein of thrombocytopoiesis in a platelet-resistant patient with Acute Myeloid Leukemia (M-1). Thrombocyte reconstitution was expressed as the change in platelet content of peripheral blood (PLT, ×10⁶ per ml), counted as described above at the indicated intervals following intramuscular injection (as described in the Examples section that follows) of 100 mg peptides derived from natural casein.

[0120] FIG. 18 depicts the stimulation by peptides derived from natural casein of thrombocytopoiesis in a platelet-resistant patient with Acute Myeloid Leukemia (M-2). Thrombocyte reconstitution was expressed as the change in platelet content of peripheral blood (PLT, ×10⁶ per ml), counted as described above at the indicated intervals following intramuscular injection (as described in the Examples section that follows) of 100 mg peptides derived from natural casein.

[0121] FIG. 19 shows a table depicting the synergistic effect of incubation with synthetic peptides derived from αS1-, αS2-, β- or κ-casein on hematopoietic factor stimulation of granulocyte and monocyte colony formation in CFU-GM colonies from murine bone marrow progenitor cells. Cells were scored in the macroscopic colonies grown from murine bone marrow cells prepared similarly to the CFU-GEMM colonies previously described. Cells were incubated with hematopoietic factors cytokine (IL-3) and colony stimulating factor (G-CSF), and 25 μg or more of synthetic peptides derived from casein (J), representing amino acids 1-22 of α-S1 casein (SEQ ID No. 21), or 30-4, representing amino acids 1-6 of α-S1 casein (SEQ ID No. 5), for 14 days, individually or in combination. The stimulation of colony formation (CFU) is expressed as the number of myeloid per colonies in 10⁵ plated MNCs. Note the synergistic increase in myelocyte formation in cultures exposed to G-CSF, IL-3 and either of the synthetic peptides derived from casein.

[0122] FIG. 20 shows a table depicting the synergistic effect of incubation with synthetic peptides derived from αS1-, αS2-, β- or κ-casein on hematopoietic factor stimulation of granulocyte and monocyte colony formation in CFU-GM colonies from human bone marrow progenitor cells. Cells were scored in the macroscopic colonies grown from human bone marrow cells prepared similarly to the CFU-GEMM colonies previously described. Cells were incubated with hematopoietic factors cytokine (IL-3) and colony stimulating factor (G-CSF), and 25 μg or more of synthetic peptides derived from casein: peptide J, representing amino acids 1-22 of α-S1 casein (SEQ ID NO. 21), or β-casein, representing amino acids 193-208 of β-casein (SEQ ID No. 28). Exposure of the human bone marrow progenitor cells to peptides derived from casein was for 14 days. Stimulation of colony formation (CFU) is expressed as the number of myeloid per colonies in 10⁵ plated MNCs. Note the synergistic increase (>50% with 100 μg/ml of peptide J, and >30% with 300 μg/ml of synthetic β-casein) in myelocyte formation in cultures exposed to G-CSF, IL-3 and the synthetic peptides derived from β-casein and an N terminal portion of α-S1 casein.

[0123] FIG. 21 shows a table depicting the effect of incubation with synthetic peptides derived from α S1-, αS2-, β- or κ-casein on Megakaryocytopoiesis in CFU-GEMM colonies from murine bone marrow progenitor cells. Cells were scored in the macroscopic colonies grown from murine bone marrow cells prepared similarly to the CFU-GEMM colonies previously described. Cells were incubated with 25 μg or more of synthetic peptides derived from casein: synthetic β-casein (SEQ ID NO: 28), synthetic κ-casein (SEQ ID NO: 30), and synthetic peptides derived from casein representing amino acids 1-22 of α-S1 casein (J) (SEQ ID NO:21), for 14 days. Stimulation of megakaryocyte formation is expressed as the percent of megakaryocytes (differential count). Note the dramatic effect of the synthetic peptides derived from αS1-, β- or κ-casein on Early (E.MK) megakaryocyte formation.

[0124] FIG. 22 shows a table depicting the effect of in-vitro incubation with peptides derived from αS1-, αS2-, β- or κ-casein on the growth of GEMM colonies from murine bone marrow progenitor cells. Cells were scored in the macroscopic colonies grown from murine bone marrow cells prepared similarly to the CFU-GEMM colonies previously described. Cells were incubated with hematopoietic factors, and 25 μg/ml of synthetic β-casein (193-208) (SEQ ID NO: 28) or synthetic κ-casein (106-127) (SEQ ID NO: 30), or a combination of both synthetic (β+κ), for 8 days. The stimulation of colony formation is expressed as the number of CFU-GEMM colonies as compared to controls. Note the significant effect of both the synthetic β- and synthetic κ-casein peptides on GEMM colony formation, and the synergistic effect of both synthetic β- and synthetic κ-casein in combination.

[0125] FIG. 23 shows a table depicting the stimulation of platelet reconstitution in myeloablated, bone marrow transplanted mice in response to treatment with synthetic peptides [β casein (193-208) (SEQ ID NO: 28) and κ-casein (106-127) (SEQ ID NO: 30)] and synthetic α-S1 casein [peptide J, (SEQ ID NO: 21) representing amino acids 1-22 of α-S1 casein]. Cell counts represent the number of platelets (×10³ per mm³, as counted in a Coulter Counter). The mice (n=5 per group) received sub-lethal irradiation and syngeneic bone marrow transplantation (3×10⁶ cells per mouse) on the following day, and intravenous administration of 1 mg per recipient of synthetic β-casein; synthetic κ-casein, or synthetic peptide J (SEQ ID NO: 21) representing amino acids 1-22 of α-S1 casein, or 1 mg per recipient human serum albumin (CONTROL) one day later. Platelets were measured 10 days later. Note the strong effect (>25% enhancement) of the synthetic β-casein, κ-casein and synthetic peptide. J on platelet reconstitution at 10 days post ablation.

[0126] FIG. 24 depicts the stimulation of peripheral white blood cell reconstitution in myeloablated, bone marrow transplanted mice in response to treatment with peptides derived from αS1-, β- or κ-casein. Cell counts represent the mean values of white blood cells (per ml, as counted in a haemocytometer). The mice (n=5 per group) received sub-lethal irradiation and syngeneic bone marrow transplantation (3×10⁶ cells per mouse) on the following day, and intravenous administration of 1 mg per recipient of α-S1 or κ peptides derived from natural casein prepared from gel filtration (α-S1 1-23 and κ 106-169), synthetic peptides derived from α-S1 casein (SEQ ID NO: 21) or β-casein (193-208, SEQ ID NO: 28), or 1 mg per recipient human serum albumin (CONTROL) one day later. Note the dramatic enhancement of white blood cell reconstitution by peptides derived from αS1-, β- or κ-casein at days 5 and 7 post-reconstitution.

[0127] FIG. 25 depicts the stimulation of peripheral white blood cell reconstitution in myeloablated, bone marrow transplanted mice in response to treatment with a combination of peptides derived from α-, β- or κ-casein. Cell counts represent the mean values of white blood cells (×10⁴ per ml, as counted in a haemocytometer). The mice (n=5 per group) received sub-lethal irradiation and syngeneic bone marrow transplantation (10 cells per mouse) on the following day, and intravenous administration of 1 mg per recipient of synthetic peptides derived from α-S1 casein (J, SEQ ID NO: 21) or β-casein (193-208, SEQ ID NO: 28), a combination thereof [0.5 mg each of α-S1-(J) and β-casein] or saline (Saline) one day later. Note the dramatic enhancement of white blood cell reconstitution by the combination of peptides derived from αS1- and β-casein at days 10 and 12 post-reconstitution.

[0128] FIGS. 26a-26i are tables depicting a representative series of chimeric peptides comprising amino acid sequences of the N-terminal sequence of αS1-casein (SEQ ID NO: 25) and β-casein (SEQ ID NO: 28).

### DESCRIPTION OF-THE PREFERRED EMBODIMENTS

[0129] The present invention is of biologically active peptides that are derived from or are similar to sequences of the αS1-, αS2-, β- or κ-casein fractions of milk casein, compositions containing same and methods of utilizing same in, for example, stimulating and enhancing immune response, protecting against viral infection, normalizing serum cholesterol levels, and stimulating hematopoiesis. The casein-derived peptides are non-toxic and can be used to treat and prevent, for example, immune pathologies, hypercholesterolemia, hematological disorders and viral-related diseases.

[0130] The principles and operation of the present invention may be better understood with reference to the drawings and accompanying descriptions.

[0131] Before explaining at least one embodiment of the invention in detail, it is to be understood, that the invention is not limited in its application to the details set forth in the following description or exemplified by the Examples. The invention is capable of other embodiments or of being practiced or carried out in various ways. Also, it is to be understood that the phraseology and terminology employed herein is for the purpose of description and should not be regarded as limiting.

[0132] As used herein, the term “treating” includes substantially inhibiting, slowing or reversing the progression of a disease, and/or substantially ameliorating clinical symptoms of a disease.

[0133] As used herein, the term “preventing” includes substantially preventing the appearance of clinical symptoms of a disease.

[0134] As used herein the term “peptide” includes native peptides (either degradation products, synthetically synthesized peptides or recombinant peptides) and peptido-mimetics (typically, synthetically synthesized peptides), such as peptoids and semipeptoids which are peptide analogs, which may have, for example, modifications rendering the peptides more stable while in a body. Such modifications include, but are not limited to, cyclization, N terminus modification, C terminus modification, peptide bond modification, including, but not limited to, CH₂—NH, CH₂—S, CH₂—S═O, O═C—NH, CH₂—O, CH₂—CH₂, S═C—NH, CH═CH or CF═CH, backbone modification and residue modification. Methods for preparing peptido-mimetic compounds are well known in the art and are specified, for example, in Quantitative Drug Design, C.A. Ramsden Gd., Chapter 17.2, F. Choplin Pergamon Press (1992), which is incorporated by reference as if fully set forth herein. Further detail in this respect are provided hereinunder.

[0135] Thus, a peptide according to the present invention can be a cyclic peptide. Cyclization can be obtained, for example, through amide bond formation, e.g., by incorporating Glu, Asp, Lys, Orn, di-amino butyric (Dab) acid, di-aminopropionic (Dap) acid at various positions in the chain (—CO—NH or —NH—CO bonds). Backbone to backbone cyclization can also be obtained through incorporation of modified amino acids of the formulas H—N((CH₂)ₙ—COOH)—C(R)H—COOH or H—N((CH₂)ₙ—COOH)—C(R)H—NH₂, wherein n=1-4, and further wherein R is any natural or non-natural side chain of an amino acid.

[0136] Cyclization via formation of S—S bonds through incorporation of two Cys residues is also possible. Additional side-chain to side chain cyclization can be obtained via formation of an interaction bond of the formula —(—CH₂—)ₙ—S—CH₂—C—, wherein n=1 or 2, which is possible, for example, through incorporation of Cys or homoCys and reaction of its free SH group with, e.g., bromoacetylated Lys, Orn, Dab or Dap.

[0137] Peptide bonds (—CO—NH—) within the peptide may be substituted, for example, by N-methylated bonds (—N(CH₃)—CO—), ester bonds (—C(R)H—C—O—O—C(R)—N—), ketomethylene bonds (—CO—CH₂—), α-aza bonds (—NH—N(R)—CO—), wherein R is any alkyl, e.g., methyl, carba bonds (—CH₂—NH—), hydroxyethylene bonds (—CH(OH)—CH₂—), thioamide bonds (—CS—NH—), olefinic double bonds (—CH═CH—), retro amide bonds (—NH—CO—), peptide derivatives (—N(R)—CH₂—CO—), wherein R is the “normal” side chain, naturally presented on the carbon atom.

[0138] These modifications can occur at any of the bonds along the peptide chain and even at several (2-3) at the same time.

[0139] Natural aromatic amino acids, Trp, Tyr and Phe, may be substituted for synthetic non-natural acid such as TIC, naphthylelanine (Nol), ring-methylated derivatives of Phe, halogenated derivatives of Phe or o-methyl-Tyr.

[0140] Tables 1-2 below list all the naturally occurring amino acids (Table 1) and non-conventional or modified amino acids (Table 2).

TABLE 1

| | Three-Letter | One-letter |
|---|---|---|
| Amino Acid | Abbreviation | Symbol |
| Alanine | Ala | A |
| Arginine | Arg | R |
| Asparagine | Asn | N |
| Aspartic acid | Asp | D |
| Cysteine | Cys | C |
| Glutamine | Gln | Q |
| Glutamic Acid | Glu | E |
| Glycine | Gly | G |
| Histidine | His | H |
| Isoleucine | Iie | I |
| Leucine | Leu | L |
| Lysine | Lys | K |
| Methionine | Met | M |
| Phenylalanine | Phe | F |
| Proline | Pro | P |
| Serine | Ser | S |
| Threonine | Thr | T |
| Tryptophan | Trp | W |
| Tyrosine | Tyr | Y |
| Valine | Val | V |
| Any amino acid as above | Xaa | X |

[0141] TABLE 2

| Non-conventional amino acid | Code |
|---|---|
| α-aminobutyric acid | Abu |
| α-amino-α-methylbutyrate | Mgabu |
| aminocyclopropane- | Cpro |
| Carboxylate | |
| aminoisobutyric acid | Aib |
| aminonorbornyl- | Norb |
| carboxylate | |
| cyclohexylalanine | Chexa |
| cyclopentylalanine | Cpen |
| D-alanine | Dal |
| D-arginine | Darg |
| D-aspartic acid | Dasp |
| D-cysteine | Dcys |
| D-glutamine | Dgln |
| D-glutamic acid | Dglu |
| D-histidine | Dhis |
| D-isoleucine | Dile |
| D-leucine | Dleu |
| D-lysine | Dlys |
| D-methionine | Dmet |
| D-ornithine | Dorn |
| D-phenylalanine | Dphe |
| D-proline | Dpro |
| D-serine | Dser |
| D-threonine | Dthr |
| D-tryptophan | Dtrp |
| D-tyrosine | Dtyr |
| D-valine | Dval |
| D-α-methylalanine | Dmala |
| D-α-methylarginine | Dmarg |
| D-α-methylasparagine | Dmasn |
| D-α-methylaspartate | Dmasp |
| D-α-methylcysteine | Dmcys |
| D-α-methylglutamine | Dmgln |
| D-α-methylhistidine | Dmhis |
| D-α-methylisoleucine | Dmile |
| D-α-methylleucine | Dmleu |
| D-α-methyllysine | Dmlys |
| D-α-methylmethionine | Dmmet |
| D-α-methylornithine | Dmorn |
| D-α-methylphenylalanine | Dmphe |
| D-α-methylproline | Dmpro |
| D-α-methylserine | Dmser |
| D-α-methylthreonine | Dmthr |
| D-α-methyltryptophan | Dmtrp |
| D-α-methyltyrosine | Dmty |
| D-α-methylvaline | Dmval |
| D-α-methylalnine | Dnmala |
| D-α-methylarginine | Dnmarg |
| D-α-methylasparagine | Dnmasn |
| D-α-methylasparatate | Dnmasp |
| D-α-methylcysteine | Dnmcys |
| D-N-methylleucine | Dnmleu |
| D-N-methyllysine | Dnmlys |
| N-methylcyclohexylalanine | Nmchexa |
| D-N-methylornithine | Dnmorn |
| N-methylglycine | Nala |
| N-methylaminoisobutyrate | Nmaib |
| N-(1-methylpropyl)glycine | Nile |
| N-(2-methylpropyl)glycine | Nile |
| N-(2-methylpropyl)glycine | Nleu |
| D-N-methyltryptophan | Dnmtrp |
| D-N-methyltyrosine | Dnmtyr |
| D-N-methylvaline | Dnmval |
| γ-aminobutyric acid | Gabu |
| L-t-butylglycine | Tbug |
| L-ethylglycine | Etg |
| L-homophenylalanine | Hphe |
| L-α-methylarginine | Marg |
| L-α-methylaspartate | Masp |
| L-α-methylcysteine | Mcys |
| L-α-methylglutamine | Mgln |
| L-α-methylhistidine | Mhis |
| L-α-methylisoleucine | Mile |
| D-N-methylglutamine | Dnmgln |
| D-N-methylglutamate | Dnmglu |
| D-N-methylhistidine | Dnmhis |
| D-N-methylisoleucine | Dnmile |
| D-N-methylleucine | Dnmleu |
| D-N-methyllysine | Dnmlys |
| N-methylcyclohexylalanine | Nmchexa |
| D-N-methylornithine | Dnmorn |
| N-methylglycine | Nala |
| N-methylaminoisobutyrate | Nmaib |
| N-(1-methylpropyl)glycine | Nile |
| N-(2-methylpropyl)glycine | Nleu |
| D-N-methyltryptophan | Dnmtrp |
| D-N-methyltyrosine | Dnmtyr |
| D-N-methylvaline | Dnmval |
| γ-aminobutyric acid | Gabu |
| L-t-butylglycine | Tbug |
| L-ethylglycine | Etg |
| L-homophenylalanine | Hphe |
| L-α-methylarginine | Marg |
| L-α-methylaspartate | Masp |
| L-α-methylcysteine | Mcys |
| L-α-methylglutamine | Mgln |
| L-α-methylhistidine | Mhis |
| L-α-methylisoleucine | Mile |
| L-α-methylleucine | Mleu |
| L-α-methylmethionine | Mmet |
| L-α-methylnorvaline | Mnva |
| L-α-methylphenylalanine | Mphe |
| L-α-methylserine | Mser |
| L-α-methylvaline | Mtrp |
| L-α-methylleucine | Mval |
| | Nnbhm |
| N-(N-(2,2-diphenylethyl) | |
| carbamylmethyl-glycine | Nnbhm |
| 1-carboxy-1-(2,2-diphenyl | Nmbc |
| ethylamino)cyclopropane | |
| L-N-methylalanine | Nmala |
| L-N-methylarginine | Nmarg |
| L-N-methylasparagine | Nmasn |
| L-N-methylaspartic acid | Nmasp |
| L-N-methylcysteine | Nmcys |
| L-N-methylglutamine | Nmgin |
| L-N-methylglutamic acid | Nmglu |
| L-N-methylhistidine | Nmhis |
| L-N-methylisolleucine | Nmile |
| L-N-methylleucine | Nmleu |
| L-N-methyllysine | Nmlys |
| L-N-methylmethionine | Nmmet |
| L-N-methylnorleucine | Nmnle |
| L-N-methylnorvaline | Nmnva |
| L-N-methylornithine | Nmorn |
| L-N-methylphenylalanine | Nmphe |
| L-N-methylproline | Nmpro |
| L-N-methylserine | Nmser |
| L-N-methylthreonine | Nmthr |
| L-N-methyltryptophan | Nmtrp |
| L-N-methyltyrosine | Nmtyr |
| L-N-methylvaline | Nmval |
| L-N-methylethylglycine | Nmetg |
| L-N-methyl-t-butylglycine | Nmtbug |
| L-norleucine | Nle |
| L-norvaline | Nva |
| α-methyl-aminoisobutyrate | Maib |
| α-methyl-γ-aminobutyrate | Mgabu |
| α-methylcyclohexylalanine | Mchexa |
| α-methylcyclopentylalanine | Mcpen |
| (α-methyl-α-napthylalanine | Manap |
| α-methylpenicillamine | Mpen |
| N-(4-aminobutyl)glycine | Nglu |
| N-(2-aminoethyl)glycine | Naeg |
| N-(3-aminopropyl)glycine | Norn |
| N-amino-α-methylbutyrate | Nmaabu |
| α-napthylalanine | Anap |
| N-benzylglycine | Nphe |
| N-(2-carbamylethyl)glycine | Ngln |
| N-(carbamylmethyl)glycine | Nasn |
| N-(2-carboxyethyl)glycine | Nglu |
| N-(carboxymethyl)glycine | Nasp |
| N-cyclobutylglycine | Ncbut |
| N-cycloheptylglycine | Nchep |
| N-cyclohexylglycine | Nchex |
| N-cyclodecylglycine | Ncdec |
| N-cyclododeclglycine | Ncdod |
| N-cyclooctylglycine | Ncoct |
| N-cyclopropylglycine | Ncpro |
| N-cycloundecylglycine | Ncund |
| N-(2,2-diphenylethyl)glycine | Nbhm |
| N-(3,3-diphenylpropyl)glycine | Nbhe |
| N-(3-indolylyethyl) glycine | Nhtrp |
| N-methyl-γ-aminobutyrate | Nmgabu |
| D-N-methylmethionine | Dnmmet |
| N-methylcyclopentylalanine | Nmcpen |
| D-N-methylphenylalanine | Dnmphe |
| D-N-methylproline | Dnmpro |
| D-N-methylserine | Dnmser |
| D-N-methylserine | Dnmser |
| D-N-methylthreonine | Dnmthr |
| N-(1-methylethyl)glycine | Nva |
| N-methyla-napthylalanine | Nmanap |
| N-methylpenicillamine | Nmpen |
| N-(p-hydroxyphenyl)glycine | Nhtyr |
| N-(thiomethyl)glycine | Ncys |
| Penicillamine | Pen |
| L-α-methylalanine | Mala |
| L-α-methylasparagine | Masn |
| L-α-methyl-t-butylglycine | Mtbug |
| L-methylethylglycine | Metg |
| L-α-methylglutamate | Mglu |
| L-α-methylhomo phenylalanine | Mhphe |
| N-(2-methylthioethyl)glycine | Nmet |
| N-(3-guanidinopropyl)glycine | Narg |
| N-(1-hydroxyethyl)glycine | Nthr |
| N-(hydroxyethyl)glycine | Nser |
| N-(imidazolylethyl)glycine | Nhis |
| N-(3-indolylyethyl)glycine | Nhtrp |
| N-methyl-γ-aminobutyrate | Nmgabu |
| D-N-methylmethionine | Dnmmet |
| N-methylcyclopentylalanine | Nmcpen |
| D-N-methylphenylalanine | Dnmphe |
| D-N-methylproline | Dnmpro |
| D-N-methylserine | Dnmser |
| D-N-methylthreonine | Dnmthr |
| N-(1-methylethyl)glycine | Nval |
| N-methyla-napthylalanine | Nmanap |
| N-methylpenicillamine | Nmpen |
| N-(p-hydroxyphenyl)glycine | Nhtyr |
| N-(thiomethyl)glycine | Ncys |
| Penicillamine | Pen |
| L-α-methylalanine | Mala |
| L-α-methylasparagine | Masn |
| L-α-methyl-t-butylglycine | Mtbug |
| L-methylethylglycine | Metg |
| L-α-methylglutamate | Mglu |
| L-α-methylhomophenylalanine | Mhphe |
| N-(2-methylthioethyl)glycine | Nmet |
| L-α-methyllysine | Mlys |
| L-α-methylnorleucine | Mnle |
| L-α-methylornithine | Morn |
| L-α-methylproline | Mpro |
| L-α-methylthreonine | Mthr |
| L-α-methyltyrosine | Mtyr |
| L-N-methylhomophenylalanine | Nmhphe |
| N-(N-(3,3-diphenylpropyl) | |
| carbamylmethyl(1)glycine | Nnbhe |

[0142] A peptide according to the present invention can be used in a self standing form or be a part of moieties such as proteins and display moieties such as display bacteria and phages. The peptides of the invention can also be chemically modified to give active dimers or multimers, in one polypeptide chain or covalently crosslinked chains.

[0143] Additionally, a peptide according to the present invention includes at least two, optionally at least three, optionally at least four, optionally at least five, optionally at least six, optionally at least seven, optionally at least eight, optionally at least nine, optionally at least ten, optionally at least eleven, optionally at least twelve, optionally at least thirteen, optionally at least fourteen, optionally at least fifteen, optionally at least sixteen, optionally at least seventeen, optionally at least eighteen, optionally at least nineteen, optionally at least twenty, optionally at least twenty-one, optionally at least twenty-two, optionally at least twenty-three, optionally at least twenty-four, optionally at least twenty-five, optionally at least twenty-six, optionally between twenty-seven and sixty, or more amino acid residues (also referred to herein interchangeably as amino acids).

[0144] Accordingly, as used herein the term “amino acid” or “amino acids” is understood to include the 20 naturally occurring amino acids; those amino acids often modified post-translationally in vivo, including, for example, hydroxyproline, phosphoserine and phosphothreonine; and other unusual amino acids including, but not limited to, 2-aminoadipic acid, hydroxylysine, isodesmosine, nor-valine, nor-leucine and ornithine. Furthermore, the term “amino acid” includes both D- and L-amino acids.

[0145] As used herein the phrase “derived from α-, β- or κ-casein” refers to peptides as this term is defined herein, e.g., cleavage products of α-, β- or κ-casein (referred to herein as peptides derived from natural casein), synthetic peptides chemically synthesized to correspond to the amino acid sequence of α, β- or κ-casein (referred to herein as synthetic peptides derived from casein), peptides similar (homologous) to αS1-casein, αS2-casein β-casein, κ-casein, for example, peptides characterized by one or more amino acid substitutions, such as, but not limited to, permissible substitutions, provided that at least 70%, preferably at least 80%, more preferably at least 90% similarity is maintained, and functional homologues thereof. The terms “homologues” and “functional homologues” as used herein mean peptides with any insertions, deletions and substitutions which do not affect the biological activity of the peptide.

[0146] As used herein, the phrase “peptides derived from α-, β- or κ-casein and combinations thereof” also refers to the abovementioned peptides in combination with one another. As used herein, the phrase “combination thereof” is defined as any of the abovementioned peptides, derived from α-, β- or κ-casein, combined in a mixture and/or chimeric peptide with one or more additional, non-identical peptides derived from α-, β- or κ-casein. As used herein, the term “mixture” is defined as a non-covalent combination of peptides existing in variable proportions to one another, whereas the term “chimeric peptide” is defined as at least two identical or non-identical peptides covalently attached one to the other. Such attachment can be any suitable chemical is linkage, direct or indirect, as via a peptide bond, or via covalent bonding to an intervening linker element, such as a linker peptide or other chemical moiety, such as an organic polymer. Such chimeric peptides may be linked via bonding at the carboxy (C) or amino (N) termini of the peptides, or via bonding to internal chemical groups such as straight, branched or cyclic side chains, internal carbon or nitrogen atoms, and the like. According to a preferred embodiment of the present invention, the chimeric peptide comprises a peptide derived from an N terminus portion of α-S1 casein as set forth in any of SEQ ID NOs:1-25 linked via the carboxy (C) terminal with the amino (N) terminal of a peptide derived from α-, β- or κ-casein as set forth in any of SEQ ID NOs: 1-33 and 434-4000. SEQ ID NOs: 434-4000 represent all possible peptides of at least 2 amino acids derived from the major and minor peptides derived from natural casein, as described hereinbelow (SEQ ID NOs: 25, and 27-33). It will be appreciated that, in further embodiments the chimeric peptides of the present invention can comprise all possible permutations of any of the peptides having an amino acid sequence as set forth in SEQ ID NOs: 1-33 and 34-4000, covalently linked to any other of the peptides having an amino acid sequence as set forth in any of SEQ ID NOs: 1-33 and 34-4000. Such chimeric peptides can be easily identified and prepared by one of ordinary skill in the art, using well known methods of peptide synthesis and/or covalent linkage of peptides, from any of the large but finite number of combinations of peptides having an amino acid sequence as set forth in SEQ ID NOs: 1-33 and 434-4000. Non-limiting examples of such chimeric peptides comprising permutations of peptides derived from α-S1 casein, as set forth in SEQ ID NOs: 1-25, covalently linked to peptides derived from β-casein, as set forth in SEQ ID NOs: 27 and 28, designated SEQ ID NOs: 34-433, are presented in FIG. 26 hereinbelow.

[0147] The chimeric peptides of the present invention may be produced by recombinant means or may be chemically synthesised by, for example, the stepwise addition of one or more amino acid residues in defined order using solid phase peptide synthetic techniques. Where the peptides may need to be synthesised in combination with other proteins and then subsequently isolated by chemical cleavage or alternatively the peptides or polyvalent peptides may be synthesised in multiple repeat units. The peptides may comprise naturally occurring amino acid residues or may also contain non-naturally occurring amino acid residues such as certain D-isomers or chemically modified naturally occurring residues. These latter residues may be required, for example, to facilitate or provide conformational constraints and/or limitations to the peptides. The selection of a method of producing the subject peptides will depend on factors such as the required type, quantity and purity of the peptides as well as ease of production and convenience.

[0148] The chimeric peptides of the present invention may first require their chemical modification for use in vivo. Chemical modification of the subject peptides may be important to improve their biological activity. Such chemically modified chimeric peptides are referred to herein as “analogues”. The term “analogues” extends to any functional chemical or recombinant equivalent of the chimeric peptides of the present invention, characterised, in a most preferred embodiment, by their possession of at least one of the abovementioned biological activities. The term “analogue” is also used herein to extend to any amino acid derivative of the peptides as described above.

[0149] Analogues of the chimeric peptides contemplated herein include, but are not limited to, modifications to side chains, incorporation of unnatural amino acids and/or their derivatives during peptide synthesis and the use of crosslinkers and other methods which impose conformational constraints on the peptides or their analogues.

[0150] Examples of side chain modifications contemplated by the present invention include modifications of amino groups such as by reductive alkylation by reaction with an aldehyde followed by reduction with NaBH₄; amidination with methylacetimidate; acylation with acetic anhydride; carbamoylation of amino groups with cyanate; trinitrobenzylation of amino groups with 2, 4, 6-trinitrobenzene sulphonic acid (TNBS); acylation of amino groups with succinic anhydride and tetrahydrophthalic anhydride; and pyridoxylation of lysine with pyridoxal-5′-phosphate followed by reduction with NaBH₄.

[0151] The guanidine group of arginine residues may be modified by the formation of heterocyclic condensation products with reagents such as 2,3-butanedione, phenylglyoxal and glyoxal.

[0152] The carboxyl group may be modified by carbodiimide activation via O-acylisourea formation followed by subsequent derivitisation, for example, to a corresponding amide.

[0153] Sulphydryl groups may be modified by methods such as carboxymethylation with iodoacetic acid or iodoacetamide; performic acid oxidation to cysteic acid; formation of a mixed disulphides with other thiol compounds; reaction with maleimide, maleic anhydride or other substituted maleimide; formation of mercurial derivatives using 4-chloromercuribenzoate, 4-chloromercuriphenylsulphonic acid, phenylmercury chloride, 2-chloromercuri-4-nitrophenol and other mercurials; carbamoylation with cyanate at alkaline pH.

[0154] Tryptophan residues may be modified by, for example, oxidation with N-bromosuccinimide or alkylation of the indole ring with 2-hydroxy-5-nitrobenzyl bromide or sulphenyl halides. Tyrosine residues on the other hand, may be altered by nitration with tetranitromethane to form a 3-nitrotyrosine derivative.

[0155] Modification of the imidazole ring of a histidine residue may be accomplished by alkylation with iodoacetic acid derivatives or N-carbethoxylation with diethylpyrocarbonate.

[0156] Examples of incorporating unnatural amino acids and derivatives during peptide synthesis include, but are not limited to, use of norleucine, 4-amino butyric acid, 4-amino-3-hydroxy-5-phenylpentanoic acid, 6-aminohexanoic acid, t-butylglycine, norvaline, phenylglycine, ornithine, sarcosine, 4-amino-3-hydroxy-6-methylheptanoic acid, 2-thienyl alanine and/or D-isomers of amino acids.

[0157] As used herein the phrase “derived from an N terminus portion of αS1 casein” refers to peptides as this term is defined herein, e.g., cleavage products of αS1 casein (referred to herein as peptides derived from natural casein), synthetic peptides chemically synthesized to correspond to the amino acid sequence of an N terminus portion of αS1 casein (referred to herein as synthetic peptides derived from casein), peptides similar (homologous) to an N terminus portion of αS1 casein, for example, peptides characterized by one or more amino acid substitutions, such as, but not limited to, permissible substitutions, provided that at least 70%, preferably at least 80%, more preferably at least 90% similarity is maintained, and functional homologues thereof. The terms “homologues” and “functional homologues” as used herein mean peptides with any insertions, deletions and substitutions that do not affect the biological activity of the peptide.

[0158] As used herein the phrase “derived from α-, β- and κ-casein” refers to peptides as this term is defined herein, e.g., cleavage products of α-, β- and κ-casein (referred to herein as peptides derived from natural casein), synthetic peptides chemically synthesized to correspond to the amino acid sequence of α-, β- and κ-casein (referred to herein as synthetic peptides derived from α-, β- and κ-casein), peptides similar (homologous) to α-, β- and κ-casein, for example, peptides characterized by one or more amino acid substitutions, such as, but not limited to, permissible substitutions, provided that at least 70%, preferably at least 80%, more preferably at least 90% similarity is maintained, and functional homologues thereof. The terms “homologues” and “functional homologues” as used herein mean peptides with any insertions, deletions and substitutions that do not affect the biological activity of the peptide.

[0159] As used herein the terms “α-casein”, “β-casein” and “κ-casein” refer to “αS1 casein”, “αS2 casein”, “β-casein” and “κ-casein” of a mammal, including, but not limited to, livestock mammals (e.g., cow, sheep, goat, mare, camel, deer and buffalo) human beings and marine mammals. The following provides a list of αS1 caseins, β-caseins and κ-caseins having a known amino acid sequence, identified by their GenBank (NCBI) Accession Nos. and source: αS1 caseins: CAA26982 (Ovis aries (sheep)), CAA51022 (Capra hircus (goat)), CAA42516 (Bos taurus (bovine)), CAA551.85 (Homo sapiens), CAA38717 (Sus scrofa (pig)), P09115 (rabbit) and O97943 (Camelus dromedurius (camel)); β-caseins: NP 851351 (Bos taurus (bovine)), NP 058816 (Rattus norvegicus (rat)), NP 001882 (Homo sapiens (human)), NP 034102 (Mus musculus (mouse)), CAB39313 (Capra hircus (goat)), CAA06535 (Bubalus bubalis (water buffalo)), CAA38718 (Sus scrofa (pig)), BAA95931 (Canis familiaris (dog)), and CAA34502 (Ovis aires (sheep)); κ-caseins: NP 776719 (Bos taurus (bovine)), NP 113750 (Rattus norvegicus (rat)), NP 031812 (Mus musculus (mouse)), NP 005203 (Homo sapiens (human)) and AAM12027 (Capra hircus (goat)).

[0160] As used herein the term “N terminus portion” refers to M amino acids of αS1 casein derived from the first 60 amino acids of αS1 casein, wherein M is any of the integers between 2 and 60 (including the integers 2 and 60). Preferably, the term refers to the first M amino acids of αS1 casein.

[0161] The peptides of the invention can be obtained by extraction from milk as previously described, or by solid phase peptide synthesis, which is a standard method known to the man skilled in the art. Purification of the peptides of the invention is performed by standard techniques, known to the man skilled in the art, such as high performance liquid chromatography (HPLC), diafiltration on rigid cellulose membranes (Millipore) and gel filtration. Milk casein fragmentation to obtain the peptides of the invention may be effected using various enzymatic and/or chemical means, as described hereinbelow.

[0162] As is further detailed hereinunder and exemplified in the Examples section that follows, the peptides of the present invention have a variety of therapeutic effects. In the Examples section there are provided numerous assays with which one of ordinary skills in the art can test a specific peptide designed in accordance with the teachings of the present invention for a specific therapeutic effect. Any of the peptides described herein can be administered per se or be formulated into a pharmaceutical composition which can be used for treating or preventing a disease. Such a composition includes as an active ingredient any of the peptides described herein and a pharmaceutically acceptable carrier.

[0163] As used herein a “pharmaceutical composition” refers to a preparation of one or more of the peptides described herein, with other chemical components such as pharmaceutically suitable carriers and excipients. The purpose of a pharmaceutical composition is to facilitate administration of a compound to an organism.

[0164] Hereinafter, the term “pharmaceutically acceptable carrier” refers to a carrier or a diluent that does not cause significant irritation to an organism and does not abrogate the biological activity and properties of the administered compound. Examples, without limitations, of carriers are: propylene glycol, saline, emulsions and mixtures of organic solvents with water. Herein the term “excipient” refers to an inert substance added to a pharmaceutical composition to further facilitate administration of a compound. Examples, without limitation, of excipients include calcium carbonate, calcium phosphate, various sugars and types of starch, cellulose derivatives, gelatin, vegetable oils and polyethylene glycols.

[0165] Techniques for formulation and administration of drugs may be found in “Remington's Pharmaceutical Sciences,” Mack Publishing Co., Easton, Pa., latest edition.

[0166] Suitable routes of administration may, for example, include oral, rectal, transmucosal, transdermal, intestinal or parenteral delivery, including intramuscular, subcutaneous and intramedullary injections as well as intrathecal, direct intraventricular, intravenous, intraperitoneal, intranasal, or intraocular injections.

[0167] Pharmaceutical compositions of the present invention may be manufactured by processes well known in the art, e.g., by means of conventional mixing, dissolving, granulating, dragee-making, levigating, emulsifying, encapsulating, entrapping or lyophilizing processes.

[0168] Pharmaceutical compositions for use in accordance with the present invention thus may be formulated in conventional manner using one or more pharmaceutically acceptable carriers comprising excipients and auxiliaries, which facilitate processing of the active peptides into preparations which, can be used pharmaceutically. Proper formulation is dependent upon the route of administration chosen.

[0169] For injection, the peptides of the invention may be formulated in aqueous solutions, preferably in physiologically compatible buffers such as Hank's solution, Ringer's solution, or physiological saline buffer with or without organic solvents such as propylene glycol, polyethylene glycol. For transmucosal administration, penetrants are used in the formulation. Such penetrants are generally known in the art.

[0170] For oral administration, the peptides can be formulated readily by combining the active peptides with pharmaceutically acceptable carriers well known in the art. Such carriers enable the peptides of the invention to be formulated as tablets, pills, dragees, capsules, liquids, gels, syrups, slurries, suspensions, and the like, for oral ingestion by a patient. Pharmacological preparations for oral use can be made using a solid excipient, optionally grinding the resulting mixture, and processing the mixture of granules, after adding suitable auxiliaries if desired, to obtain tablets or dragee cores. Suitable excipients are, in particular, fillers such as sugars, including lactose, sucrose, mannitol, or sorbitol; cellulose preparations such as, for example, maize starch, wheat starch, rice starch, potato starch, gelatin, gum tragacanth, methyl cellulose, hydroxypropylmethyl-cellulose, sodium carbomethylcellulose; and/or physiologically acceptable polymers such as polyvinylpyrrolidone (PVP). If desired, disintegrating agents may be added, such as cross-linked polyvinyl pyrrolidone, agar, or alginic acid or a salt thereof such as sodium alginate.

[0171] Dragee cores are provided with suitable coatings. For this purpose, concentrated sugar solutions may be used which may optionally contain gum arabic, talc, polyvinyl pyrrolidone, carbopol gel, polyethylene glycol, titanium dioxide, lacquer solutions and suitable organic solvents or solvent mixtures. Dyestuffs or pigments may be added to the tablets or dragee coatings for identification or to characterize different combinations of active ingredient doses.

[0172] Pharmaceutical compositions, which can be used orally, include push-fit capsules made of gelatin as well as soft, sealed capsules made of gelatin and a plasticizer, such as glycerol or sorbitol. The push-fit capsules may contain the active ingredients in admixture with filler such as lactose, binders such as starches, lubricants such as talc or magnesium stearate and, optionally, stabilizers. In soft capsules, the active peptides may be dissolved or suspended in suitable liquids, such as fatty oils, liquid paraffin, or liquid polyethylene glycols. In addition, stabilizers may be added. All formulations for oral administration should be in dosages suitable for the chosen route of administration.

[0173] For buccal administration, the compositions may take the form of tablets or lozenges formulated in conventional manner.

[0174] For administration by inhalation, the peptides according to the present invention are conveniently delivered in the form of an aerosol spray presentation from a pressurized pack or a nebulizer with the use of a suitable propellant, e.g., dichlorodifluoromethane, trichlorofluoromethane, dichloro-tetrafluoroethane or carbon dioxide. In the case of a pressurized aerosol, the dosage unit may be determined by providing a valve to deliver a metered amount. Capsules and cartridges of, e.g., gelatin for use in an inhaler or insufflator may be formulated containing a powder mix of the compound and a suitable powder base such as lactose or starch.

[0175] The peptides described herein may be formulated for parenteral administration, e.g., by bolus injection or continuous infusion. Formulations for injection may be presented in unit dosage form, e.g., in ampoules or in multidose containers with optionally, an added preservative. The compositions may be suspensions, solutions or emulsions in oily or aqueous vehicles, and may contain formulatory agents such as suspending, stabilizing and/or dispersing agents.

[0176] Pharmaceutical compositions for parenteral administration include aqueous solutions of the active preparation in water-soluble form. Additionally, suspensions of the active peptides may be prepared as appropriate oily injection suspensions. Suitable lipophilic solvents or vehicles include fatty oils such as sesame oil, or synthetic fatty acids esters such as ethyl oleate, triglycerides or liposomes. Aqueous injection suspensions may contain substances, which increase the viscosity of the suspension, such as sodium carboxymethyl cellulose, sorbitol or dextran. Optionally, the suspension may also contain suitable stabilizers or agents that increase the solubility of the peptides to allow for the preparation of highly concentrated solutions.

[0177] Alternatively, the active ingredient may be in powder form for constitution with a suitable vehicle, e.g., sterile, pyrogen-free water, before use.

[0178] The peptides of the present invention may also be formulated in rectal compositions such as suppositories or retention enemas, using, e.g., conventional suppository bases such as cocoa butter or other glycerides.

[0179] The pharmaceutical compositions herein described may also comprise suitable solid of gel phase carriers or excipients. Examples of such carriers or excipients include, but are not limited to, calcium carbonate, calcium phosphate, various sugars, starches, cellulose derivatives, gelatin and polymers such as polyethylene glycols.

[0180] Persons ordinarily skilled in the art can easily determine optimum dosages and dosing methodology for any of the peptides of the invention.

[0181] For any peptide used in accordance with the teachings of the present invention, a therapeutically effective amount, also referred to as a therapeutically effective dose, which can be estimated initially from cell culture assays or in vivo animal assays. For example, a dose can be formulated in animal models to achieve a circulating concentration range that includes the IC₅₀ or the IC₁₀₀ as determined in cell culture. Such information can be used to more accurately determine useful doses in humans. Initial dosages can also be estimated from in vivo data. Using these initial guidelines one having ordinary skill in the art could determine an effective dosage in humans.

[0182] Moreover, toxicity and therapeutic efficacy of the peptides described herein can be determined by standard pharmaceutical procedures in cell cultures or experimental animals, e.g., by determining the LD₅₀ and the ED₅₀. The dose ratio between toxic and therapeutic effect is the therapeutic index and can be expressed as the ratio between LD₅₀ and ED₅₀. Peptides which exhibit high therapeutic indices are preferred. The data obtained from these cell cultures assays and animal studies can be used in formulating a dosage range that is not toxic for use in human. The dosage of such peptides lies preferably within a range of circulating concentrations that include the ED₅₀ with little or no toxicity. The dosage may vary within this range depending upon the dosage form employed and the route of administration utilized. The exact formulation, route of administration and dosage can be chosen by the individual physician in view of the patient's condition (see, e.g., Fingl et al., 1975, In: The Pharmacological Basis of Therapeutics, chapter 1, page 1).

[0183] Dosage amount and interval may be adjusted individually to provide plasma levels of the active ingredient which are sufficient to maintain therapeutic effect. Usual patient dosages for oral administration range from about 1-1000 mg/kg/administration, commonly from about 10-500 mg/kg/administration, preferably from about 20-300 mg/kg/administration and most preferably from about 50-200 mg/kg/administration. In some cases, therapeutically effective serum levels will be achieved by administering multiple doses each day. In cases of local administration or selective uptake, the effective local concentration of the drug may not be related to plasma concentration. One having skill in the art will be able to optimize therapeutically effective local dosages without undue experimentation.

[0184] Depending on the severity and responsiveness of the condition to be treated, dosing can also be a single administration of a slow release composition, with course of treatment lasting from several days to several weeks or until cure is effected or diminution of the disease state is achieved.

[0185] The amount of a composition to be administered will, of course, be dependent on the subject being treated, the severity of the affliction, the manner of administration, the judgment of the prescribing physician, etc.

[0186] Compositions of the present invention may, if desired, be presented in a pack or dispenser device, such as FDA approved kit, which may contain one or more unit dosage forms containing the active ingredient. The pack may, for example, comprise metal or plastic foil, such as a blister pack. The pack or dispenser device may be accompanied by instructions for administration. The pack or dispenser may also be accompanied by a notice associated with the container in a form prescribed by a governmental agency regulating the manufacture, use or sale of pharmaceuticals, which notice is reflective of approval by the agency of the form of the compositions or human or veterinary administration. Such notice, for example, may be of labeling approved by the U.S. Food and Drug Administration for prescription drugs or of an approved product insert. Compositions comprising a peptide of the invention formulated in a compatible pharmaceutical carrier may also be prepared, placed in an appropriate container, and labeled for treatment or prevention of an indicated condition or induction of a desired event. Suitable indica on the label may include treatment and/or prevention of an autoimmune disease or condition, viral disease, viral infection, bacterial infection, hematological disease, hematological deficiencies, thrombocytopenia, pancytopenia, granulocytopenia, an erythropoietin treatable condition, a thrombopoietin treatable condition, hyperlipidemia, hypercholesterolemia, glucosuria, hyperglycemia, diabetes, AIDS, infection with HIV-1, a coronovirus or SARS infection, helper T-cell disorders, dendrite cell deficiencies, macrophage deficiencies, hematopoietic stem cell disorders including platelet, lymphocyte, plasma cell and neutrophil disorders, hematopoietic stem cell proliferation, hematopoietic stem cell proliferation and differentiation, pre-leukemic conditions, leukemic conditions, immune system disorders resulting from chemotherapy or radiation therapy, and human immune system disorders resulting from treatment of diseases of immune deficiency.

[0187] The pharmaceutical compositions according to the invention may be useful in maintaining and/or restoring blood system constituents, in balancing blood cell counts, in balancing levels of metabolites in the blood including sugar, cholesterol, calcium, uric acid, urea and enzymes such as alkaline phosphatase. Further, the pharmaceutical compositions of the invention may be useful in inducing blood cell proliferation, modulating white and/or red blood cell counts, particularly increasing white and/or red blood cell counts, elevating haemoglobin blood level and in modulating platelet counts.

[0188] The term “balancing” as used herein with relation to levels of certain physiological parameters, means changing the levels of referred parameters and bringing them closer to normal values. As used herein, the term “modulating”, with regard to physiological processes such as blood cell formation, is defined as effecting a change in the quality and/or amount of said processes, including, but not limited to, increasing and decreasing frequency, character, duration, outcome, magnitude, cyclic nature, and the like. Examples of such modulation are αS1-casein and β-casein's enhancement of megakaryocyte proliferation, dendritic cell proliferation, and effect of G-CSF on CFU-GM colony growth, as described hereinbelow. It will be appreciated that, in the context of a preferred embodiment of the present invention, such “balancing” and/or “modulating” of physiological and metabolic parameters comprises modification of biological responses, and as such, peptides derived from α-, β- and κ-casein, alone or in combination therewith, can be “biological response modifiers”.

[0189] The term “normal values” as used herein with relation to physiological parameters, means values which are in the range of values of healthy humans or animals. However, it will be appreciated that nominally “healthy” subjects, having physiological parameters within or close to the ranges of values conventionally considered normal, can benefit from further “balancing” and “modulation” of such physiological parameters, towards the optimalization thereof.

[0190] In specifically preferred embodiments, the peptides of the invention are use to treat or prevent blood disease or conditions, and balance counts of red blood cells, white blood cells, platelets and haemoglobin level. The pharmaceutical compositions of the invention may be used for activating blood cell proliferation.

[0191] In addition, the pharmaceutical compositions may be used for the treatment and/or prevention of hemopoietic stem cell disorders, including platelet, lymphocyte, plasma cell, dendritic cell and neutrophil disorders, as well as deficiency and malfunction in pre-leukemic and leukemic conditions and thrombocytopenia.

[0192] Further, the pharmaceutical compositions may be used for modulating blood cell formation, including the treatment and/or prevention of cell proliferative diseases. In this connection, it is worth noting that the pharmaceutical compositions of the invention are advantageous in the stimulation of the immune response during chemotherapy or radiation treatments, in alleviating the negative effects, reducing chemotherapy and irradiation-induced vomiting and promoting a faster recovery.

[0193] Still further, the pharmaceutical compositions of the invention may be used for the stimulation of human immune response during treatment of diseases associated with immune deficiency, for example HIV and autoimmune diseases.

[0194] The compositions of the invention may also be intended for veterinary use.

[0195] The pharmaceutical compositions of the invention may be used in the treatment and/or prevention of, for example, disorders involving abnormal levels of blood cells, disorders involving hematopoietic stem cells production and differentiation, treatment of erythrocyte, platelet, lymphocyte, dendritic cell, macrophage and/or neutrophil disorders, for the treatment of pre-leukemic and leukemic conditions and for the treatment of thrombocytopenia. The pharmaceutical compositions of the invention may also be used in the treatment of cell proliferative diseases and diseases involving immune deficiency, such as HIV, and of autoimmune diseases. Further, the pharmaceutical compositions of the invention may be used for modulating the immune response during chemotherapy or radiation treatments, for example for reducing chemotherapy-associated vomiting.

[0196] While reducing the present invention to practice, it was surprisingly observed that the peptides of the invention exert a synergistic effect on human hematopoietic stem cell proliferation and differentiation with addition of other hematopoietic growth factors. Of notable significance was the potentiation of erythropoietin-mediated stimulation of erythroid colony formation, the potentiation of G-CSF-mediated stimulation of granulocyte macrophage colony formation (CFU-GM) in bone marrow cells, and the dose-dependent enhancement of thrombopoietin (TPO) induction of megakaryocyte proliferation by peptides of the present invention. G-CSF is currently used for mobilization of bone marrow hematopoietic progenitor cells in donors, as a component of a wide variety of leukemia and cancer treatments (see, for example, U.S. Pat. Nos. 6,624,154 to Benoit et al. and 6,214,863 to Bissery et al) and as a component of cell growth media for stem and progenitor cell manipulation (see, for example, U.S. Pat. No. 6,548,299 to Pykett et al). Recombinant human (rh) G-CSF, marketed as Neupogen (Filgrastim, Amgen Inc., USA) has been approved for medical use for indications relating to neutropenia and granulocytopenia, such as AIDS leukopenia and febrile neutropenia, respiratory and other infection (Kolls et al, Resp. Res. 2000; 2:9-11) and in chemotherapy protocols for non-myeloid malignancies. Recombinant human (rh) EPO is currently an approved therapy for indications such as renal anemia, anemia of prematurity, cancer- and AIDS-associated anemia, and for pre-elective surgical treatment (Sowade, B et al. Int J Mol Med 1998; 1:305).

[0197] Thus, in one preferred embodiment, a blood disease or condition such as thrombocytopenia, pancytopenia, granulocytopenia, an erythropoietin treatable condition, a thrombopoietin treatable condition, or a G-CSF treatable condition is treated by administering to a subject in need thereof a therapeutically effective amount of a peptide derived from an α-, β- or κ-casein or a combination thereof.

[0198] Further according to the present invention there is provided a method of augmenting the effect of erythropoietin, thrombopoietin, or G-CSF, the method is effected by administering to a subject in need thereof a therapeutically effective amount of a peptide derived from an α-, β- or κ-casein or a combination thereof. In one preferred embodiment, the method further comprises administering a blood cell stimulating factor such as erythropoietin, thrombopoietin, and G-CSF.

[0199] Thrombopoietin is an early acting cytokine with important multilineage effects: TPO alone, or in combination with other early acting cytokines, can (i) promote viability and suppress apoptosis in progenitor cells; (ii) regulate hematopoietic stem cell production and function; (iii) trigger cell division of dormant multipotent cells; (iv) induce multilineage differentiation and (v) enhance formation of multilineage colonies containing granulocytes, erythrocytes, macrophages, and megakaryocytes (MK, CFU-GEMM). Moreover, TPO stimulates the production of more limited progenitors for granulocyte/monocyte, megakaryocyte and erythroid colonies, stimulates adhesion of primitive human bone marrow and megakaryocytic cells to fibronectin and fibrinogen. G-CSF is similar in action, but is specific for cells of granulocyte lineage, while EPO stimulates development of red blood cells and red blood cell progenitors. Thus, TPO, EPO and G-CSF are important cytokines for clinical hematologists/transplanters: for the mobilization, amplification and ex vivo expansion of stem cells and committed precursor cells for autologous and allogeneic transplantation. In addition, administration of TPO and G-CSF to healthy platelet donors has been employed to enhance pheresis yields. However, clinical application of TPO, EPO and G-CSF therapy is complicated by, among other considerations, relatively high costs of the recombinant human cytokine rhTPO, EPO and G-CSF and the potential antigenicity of TPO, EPO and G-CSF with repeated administration.

[0200] Combined treatment with such blood cell stimulating factor as TPO, EPO and G-CSF, and the peptide of the present invention, either together in a pharmaceutical composition comprising both, or separately, can provide inexpensive, proven non-toxic augmentation of the cytokines effects on target cell proliferation and function. In such a combination, the peptide of the present invention may be applied to the treatment of, in addition to the abovementioned conditions, disorders such as myelodysplastic syndrome (MDS), non-myeloid malignancies, aplastic anemia and complications of liver failure. Pre-treatment of platelet donors with the peptide of the present invention, alone or in combination with TPO and G-CSF, may even further enhance the efficiency of pheresis yields.

[0201] Thus, according to the present invention there is provided a method of preventing or treating a blood disease or condition, such as a thrombopoietin treatable condition, an erythropoietin treatable condition, and a G-CSF treatable condition, the method is effected by administering to a subject in need thereof a therapeutically effective amount of a peptide derived from an α-, β- or κ-casein or a combination thereof.

[0202] Further according to the present invention there is provided a method of augmenting the effect of thrombopoietin, erythropoietin, and G-CSF, the method is effected by administering to a subject in need thereof a therapeutically effective amount of a peptide derived from an α-, β- or κ-casein or a combination thereof.

[0203] Further according to the present invention there is provided a method of modulating blood cell formation, the method is effected by administering to a subject in need thereof an effective amount of a pharmaceutical composition comprising effective amounts of a peptide derived from an α-, β- or κ-casein or a combination thereof alone, or in combination with blood cell stimulating factors such as thrombopoietin, erythropoietin, and G-CSF, as described hereinabove.

[0204] In one preferred embodiment, modulating blood cell formation includes inducing hematopoiesis, inducing hematopoietic stem cell proliferation, inducing hematopoietic stem cell proliferation and differentiation, inducing megakaryocytopoiesis, inducing erythropoiesis, inducing leukocytopoiesis, inducing thrombopoiesis, inducing plasma cell proliferation, inducing dendritic cell proliferation and inducing macrophage proliferation. In a yet more preferred embodiment, the peptide derived from an α-, β- or κ-casein or a combination thereof is a synthetic peptide, alone or in combination with other, non-identical peptides derived from α-, β- or κ-casein, as described hereinabove.

[0205] Further according to the present invention there is provided a pharmaceutical composition for treating a blood disease or condition, such as a thrombopoietin treatable condition, an erythropoietin treatable condition, and a G-CSF treatable condition, the pharmaceutical composition comprising, as an active ingredient a peptide derived from an α-, β- or κ-casein or a combination thereof and a pharmaceutically acceptable carrier.

[0206] Further according to the present invention there is provided a pharmaceutical composition for augmenting the effect of a blood cell stimulating factor, such as thrombopoietin, erythropoietin and G-CSF, the pharmaceutical composition comprising, as an active ingredient a peptide derived from an α-, β- or κ-casein or a combination thereof and a pharmaceutically acceptable carrier.

[0207] Further according to the present invention there is provided a pharmaceutical composition for modulating blood cell formation, the pharmaceutical composition comprising, as active ingredients a peptide derived from an α-, β- or κ-casein or a combination thereof alone, or in combination with blood cell-stimulating factors such as thrombopoietin, erythropoietin, and G-CSF, and a pharmaceutically acceptable carrier.

[0208] In preferred embodiments, modulating blood cell formation includes inducing hematopoiesis, inducing hematopoietic stem cell proliferation, inducing hematopoietic stem cell proliferation and differentiation, inducing megakaryocytopoiesis, inducing erythropoiesis, inducing leukocytopoiesis, inducing thrombopoiesis, inducing plasma cell proliferation, inducing dendritic cell proliferation, and inducing macrophage proliferation. Methods of monitoring the modulation of blood cell formation, both in vivo and in vitro, are well known in the art, and are described in detail in the Examples section below.

[0209] Mobilization of stem cells from the bone marrow to the peripheral circulation is required in a number of medical protocols. For example, in preparation for chemotherapeutic or radiation treatment of proliferative disorders such as cancer, the patients stem cells are first mobilized from the bone marrow, usually via G-CSF, and collected for later reconstitution. Similarly, in heterologous stem cell reconstitution, the donor is treated with factors to mobilize stem cells to the peripheral circulation prior pheresis. Methods of mobilization of stem cells to the peripheral circulation are well known in the art (see, for example, U.S. Pat. No. 6,162,427 to Baumann et al., incorporated herein by reference).

[0210] While reducing the present invention to practice, it was uncovered that peptides derived from an α-, β- or κ-casein or a combination thereof enhanced and stimulated proliferation of hematopoietic cells in vivo and in vitro. Thus, according to the present invention there is provided a method of enhancing peripheral stem cell mobilization, the method is effected by administering to a subject in need thereof an effective amount of a pharmaceutical composition comprising effective amounts of a peptide derived from an α-, β- or κ-casein or a combination thereof alone, or in combination with blood cell stimulating factors such as thrombopoietin, erythropoietin, and G-CSF, as described hereinabove.

[0211] Further according to the present invention there is provided a pharmaceutical composition for treating or preventing an indication selected from the group consisting of hematological disease, hematological deficiencies, thrombocytopenia, pancytopenia, granulocytopenia, dendritic cell deficiencies, macrophage deficiencies, hematopoietic stem cell disorders including platelet, lymphocyte, plasma cell and neutrophil disorders, pre-leukemic conditions, leukemic conditions, myelodysplastic syndrome, non-myeloid malignancies, aplastic anemia and bone marrow insufficiency, the pharmaceutical composition comprising, as active ingredients, a blood cell stimulating factor such as thrombopoietin, erythropoietin or G-CSF and a peptide derived from an α-, β- or κ-casein or a combination thereof and a pharmaceutically acceptable carrier.

[0212] Further according to the present invention there is provided a pharmaceutical composition comprising a blood cell stimulating factor and a purified peptide having an amino acid sequence selected from the group consisting of SEQ ID NOs: 1-33 and a pharmaceutically acceptable carrier. In one preferred embodiment, the blood cell stimulating factor is TPO, EPO or G-CSF.

[0213] Further according to the present invention there is provided a method of enhancing colonization of donated blood stem cells in a myeloablated recipient, the method is effected by treating a donor of the donated blood stem cells with a peptide derived from an α-, β- or κ-casein or a combination thereof prior to implanting the donated blood stem cells in the recipient.

[0214] Further according to the present invention there is provided a method of enhancing colonization of donated blood stem cells in a myeloablated recipient, the method is effected by treating the donated blood stem cells with a peptide derived from an α-, β- or κ-casein or a combination thereof prior to implanting the donated blood stem cells in the recipient.

[0215] Further according to the present invention there is provided a method of enhancing colonization of blood stem cells in a myeloablated recipient, the method is effected by treating the blood stem cells with a peptide derived from an α-, β- or κ-casein or a combination thereof prior to implanting the blood stem cells in the recipient. In one preferred embodiment, the blood stem cell donor, or blood stem cells, or donated blood stem cells are further treated with a blood cell stimulating factor such as thrombopoietin, erythropoietin or G-CSF, prior to donation and implanting the blood stem cells in the recipient. In another preferred embodiment, the peptide derived from an α-, β- or κ-casein or a combination thereof is in combination with other, identical or non-identical peptide or peptides derived from α-, β- or κ-casein.

[0216] Further according to the present invention there is provided a pharmaceutical composition for enhancing colonization of donated blood stem cells in a myeloablated recipient, the pharmaceutical composition comprising, as active ingredients, a peptide derived from an α-, β- or κ-casein or a combination thereof and a pharmaceutically acceptable carrier.

[0217] Further according to the present invention there is provided a pharmaceutical composition for enhancing colonization of blood stem cells in a myeloablated recipient, the pharmaceutical composition comprising, as active ingredients, a peptide derived from an α-, β- or κ-casein or a combination thereof and a pharmaceutically acceptable carrier.

[0218] In one preferred embodiment, the pharmaceutical composition further comprises a blood cell stimulating factor such as thrombopoietin, erythropoietin or G-CSF. In another preferred embodiment, the peptide derived from α-, β- or κ-casein or a combination thereof is in combination with a peptide or peptides derived from identical or non-identical α-, β- or κ-casein.

[0219] The invention further relates to anti-bacterial pharmaceutical compositions comprising as active ingredient at least one peptide of the invention and to the use of the peptides of the invention as anti-bacterial agents.

[0220] As detailed in the Examples section hereinbelow, peptides of the invention, and pharmaceutical compositions comprising as an active ingredient a peptide of the invention, can be used in the treatment and prevention of blood cell disorders, cell proliferative diseases, diseases involving immune deficiency and autoimmune diseases.

[0221] Thus, according to the present invention there is provided a method of preventing or treating an autoimmune or infectious disease or condition, the method is effected by administering to a subject in need thereof a therapeutically effective amount of a peptide derived from an α-, β- or κ-casein or a combination thereof.

[0222] In one embodiment, the autoimmune or infectious disease or condition is a viral disease, a viral infection, AIDS and infection by HIV.

[0223] Further according to the present invention there is provided a method of preventing or treating thrombocytopenia, the method is effected by administering to a subject in need thereof a therapeutically effective amount of a peptide derived from an α-, β- or κ-casein or a combination thereof.

[0224] Further according to the present invention there is provided a method of preventing or treating pancytopenia, the method is effected by administering to a subject in need thereof a therapeutically effective amount of a peptide derived from an α-, β- or κ-casein or a combination thereof.

[0225] Further according to the present invention there is provided a method of preventing or treating granulocytopenia, the method is effected by administering to a subject in need thereof a therapeutically effective amount of a peptide derived from an α-, β- or κ-casein or a combination thereof.

[0226] While reducing the present invention to practice, it was surprisingly uncovered that administration of peptides derived from an N terminus portion of αS1 casein effectively prevented the onset of diabetic symptoms in genetically predisposed NOD mice, and balanced blood chemistry values in both human subjects having familial hypercholesterolemia and triglyceridemia, and in animal models. Thus, according to the present invention there is provided a method of preventing or treating a metabolic disease or condition, the method is effected by administering to a subject in need thereof a therapeutically effective amount of a peptide derived from an α-, β- or κ-casein or a combination thereof. In preferred embodiments, the metabolic disease or condition is non-insulin dependent diabetes mellitus, insulin-dependent diabetes mellitus, glucosuria, hyperglycemia, hyperlipidemia, and/or hypercholesterolemia.

[0227] As used herein, the term “metabolic disease or condition” is defined as a deviation or deviations from homeostatic balance of metabolites in the body, as expressed by abnormal levels of certain physiological parameters measurable in the body. Such physiological parameters can be, for example, hormone levels, electrolyte levels, blood glucose levels, enzyme levels, and the like.

[0228] Further according to the present invention there is provided a method of preventing or treating conditions associated with myeloablative doses of chemoradiotherapy supported by autologous bone marrow or peripheral blood stem cell transplantation (ASCT) or allogeneic bone marrow transplantation (BMT), the method is effected by administering to a subject in need thereof a therapeutically effective amount of a peptide derived from an N terminus portion of αS1 casein, alone or in combination with a blood cell stimulating factor such as thrombopoietin, erythropoietin or G-CSF.

[0229] Further according to the present invention there is provided a pharmaceutical composition for preventing or treating an autoimmune or infectious disease or condition, the pharmaceutical composition comprising, as an active ingredient, a peptide derived from an α-, β- or κ-casein or a combination thereof and a pharmaceutically acceptable carrier. In preferred embodiments, the disease or condition is a viral disease, a viral infection, AIDS, and/or infection by HIV. In further preferred embodiments, the peptide of the invention is administered as an adjunct therapy, in combination with additional treatment against viral and other infection, or to prevent onset, or reduce the severity of disease symptoms following viral infection, as in HIV and AIDS therapy.

[0230] Further according to the present invention there is provided a pharmaceutical composition for preventing or treating a metabolic disease or condition, the pharmaceutical composition comprising, as an active ingredient, a peptide derived from an α-, β- or κ-casein or a combination thereof and a pharmaceutically acceptable carrier. In preferred embodiments, the metabolic disease or condition is non-insulin dependent diabetes mellitus, insulin-dependent diabetes mellitus, glucosuria, hyperglycemia, hyperlipidemia, and/or hypercholesterolemia.

[0231] Further according to the present invention there is provided a method of preventing or treating conditions associated with myeloablative doses of chemoradiotherapy supported by autologous bone marrow or peripheral blood stem cell transplantation (ASCT) or allogeneic bone marrow transplantation (BMT), the method is effected by administering to a subject in need thereof a therapeutically effective amount of a peptide derived from an α-, β- or κ-casein, alone or in combination with a blood cell stimulating factor such as thrombopoietin, erythropoietin or G-CSF.

[0232] Further according to the present invention there is provided a pharmaceutical composition for preventing or treating an autoimmune or infectious disease or condition, the pharmaceutical composition comprising, as an active ingredient, a peptide derived from an α-, β- or κ-casein, alone or in combination with other identical or non-identical α-, β- or κ-casein peptides, and a pharmaceutically acceptable carrier. In preferred embodiments, the disease or condition is a viral disease, a viral infection, AIDS, and/or infection by HIV. In further preferred embodiments, the peptide of the invention is administered as an adjunct therapy, in combination with additional treatment against viral and other infection, or to prevent onset, or reduce the severity of disease symptoms following viral infection, as in HIV and AIDS therapy.

[0233] Further according to the present invention there is provided a pharmaceutical composition for preventing or treating a metabolic disease or condition, the pharmaceutical composition comprising, as an active ingredient, a peptide derived from an α-, β- or κ-casein or a combination thereof and a pharmaceutically acceptable carrier. In preferred embodiments, the metabolic disease or condition is non-insulin dependent diabetes mellitus, insulin-dependent diabetes mellitus, glucosuria, hyperglycemia, hyperlipidemia, and/or hypercholesterolemia.

[0234] Further according to the present invention there is provided a pharmaceutical composition for preventing or treating conditions associated with myeloablative doses of chemoradiotherapy supported by autologous bone marrow or peripheral blood stem cell transplantation (ASCT) or allogeneic bone marrow transplantation (BMT), the pharmaceutical composition comprising, as an active ingredient, a peptide derived from an α-, β- or κ-casein or a combination thereof and a pharmaceutically acceptable carrier.

[0235] Further according to the present invention there is disclosed the use of a peptide derived from an α-, β- or κ-casein or a combination thereof for preventing or treating an autoimmune disease.

[0236] Further according to the present invention there is disclosed the use of a peptide derived from an α-, β- or κ-casein or a combination thereof for preventing or treating a viral disease.

[0237] Further according to the present invention there is disclosed the use of a peptide derived from an α-, β- or κ-casein or a combination thereof for preventing viral infection.

[0238] Further according to the present invention there is disclosed the use of a peptide derived from an α-, β- or κ-casein or a combination thereof for inducing hematopoiesis.

[0239] Further according to the present invention there is disclosed the use of a peptide derived from an α-, β- or κ-casein or a combination thereof for inducing hematopoietic stem cells proliferation.

[0240] Further according to the present invention there is disclosed the use of a peptide derived from an α-, β- or κ-casein or a combination thereof for inducing hematopoietic stem cells proliferation and differentiation.

[0241] Further according to the present invention there is disclosed the use of a peptide derived from an α-, β- or κ-casein or a combination thereof for inducing megakaryocytopoiesis.

[0242] Further according to the present invention there is disclosed the use of a peptide derived from an α-, β- or κ-casein or a combination thereof for inducing erythropoiesis.

[0243] Further according to the present invention there is disclosed the use of a peptide derived from an α-, β- or κ-casein or a combination thereof for inducing leukocytopoiesis.

[0244] Further according to the present invention there is disclosed the use of a peptide derived from an α-, β- or κ-casein or a combination thereof for inducing thrombocytopoiesis.

[0245] Further according to the present invention there is disclosed the use of a peptide derived from α-, β- or κ-casein or a combination thereof for inducing plasma cell proliferation.

[0246] Further according to the present invention there is disclosed the use of a peptide derived from an α-, β- or κ-casein or a combination thereof for inducing dendritic cell proliferation.

[0247] Further according to the present invention there is disclosed the use of a peptide derived from an α-, β- or κ-casein or a combination thereof for inducing macrophage proliferation.

[0248] Further according to the present invention there is disclosed the use of a peptide derived from an α-, β- or κ-casein or a combination thereof for preventing or treating thrombocytopenia.

[0249] Further according to the present invention there is disclosed the use of a peptide derived from an α-, β- or κ-casein or a combination thereof for preventing or treating pancytopenia.

[0250] Further according to the present invention there is disclosed the use of a peptide derived from an α-, β- or κ-casein or a combination thereof for preventing or treating granulocytopenia.

[0251] Further according to the present invention there is disclosed the use of a peptide derived from an α-, β- or κ-casein or a combination thereof for preventing or treating hyperlipidemia.

[0252] Further according to the present invention there is disclosed the use of a peptide derived from an α-, β- or κ-casein or a combination thereof for preventing or treating cholesteremia.

[0253] Further according to the present invention there is disclosed the use of a peptide derived from an α-, β- or κ-casein or a combination thereof for preventing or treating glucosuria.

[0254] Further according to the present invention there is disclosed the use of a peptide derived from an α-, β- or κ-casein or a combination thereof for preventing or treating diabetes.

[0255] Further according to the present invention there is disclosed the use of a peptide derived from an α-, β- or κ-casein or a combination thereof for preventing or treating AIDS.

[0256] Further according to the present invention there is disclosed the use of a peptide derived from an α-, β- or κ-casein or a combination thereof for preventing or treating infection by HIV.

[0257] Further according to the present invention there is disclosed the use of a peptide derived from an α-, β- or κ-casein or a combination thereof for preventing or treating conditions associated with myeloablative doses of chemoradiotherapy supported by autologous bone marrow or peripheral blood stem cell transplantation (ASCT) or allogeneic bone marrow transplantation (BMT).

[0258] Further according to the present invention there is disclosed the use of a peptide derived from an α-, β- or κ-casein or a combination thereof for treating a thrombopoietin treatable condition.

[0259] Further according to the present invention there is disclosed the use of a peptide derived from an α-, β- or κ-casein or a combination thereof for augmenting the effect of thrombopoietin.

[0260] Further according to the present invention there is disclosed the use of a peptide derived from an α-, β- or κ-casein or a combination thereof for enhancing peripheral stem cell mobilization.

[0261] Further according to the present invention there is disclosed the use of a peptide derived from an α-, β- or κ-casein or a combination thereof for enhancing colonization of donated blood stem cells in a myeloablated recipient.

[0262] Further according to the present invention there is disclosed the use of a peptide derived from an α-, β- or κ-casein or a combination thereof for enhancing colonization of blood stem cells in a myeloablated recipient.

[0263] Further according to the present invention there is disclosed the use of a pharmaceutical composition comprising, as an active ingredient, a peptide derived from an α-, β- or κ-casein or a combination thereof, and a pharmaceutically acceptable carrier for preventing or treating an autoimmune disease.

[0264] Further according to the present invention there is disclosed the use of a pharmaceutical composition comprising, as an active ingredient, a peptide derived from an α-, β- or κ-casein, and a pharmaceutically acceptable carrier for preventing or treating a viral disease.

[0265] Further according to the present invention there is disclosed the use of a pharmaceutical composition comprising, as an active ingredient, a peptide derived from an α-, β- or κ-casein or a combination thereof casein, and a pharmaceutically acceptable carrier for preventing or treating a viral infection.

[0266] Further according to the present invention there is disclosed the use of a pharmaceutical composition comprising, as an active ingredient, a peptide derived from an α-, β- or κ-casein or a combination thereof, and a pharmaceutically acceptable carrier for inducing hematopoiesis.

[0267] Further according to the present invention there is disclosed the use of a pharmaceutical composition comprising, as an active ingredient, a peptide derived from an α-, β- or κ-casein or a combination thereof, and a pharmaceutically acceptable carrier for inducing hematopoietic stem cell proliferation.

[0268] Further according to the present invention there is disclosed the use of a pharmaceutical composition comprising, as an active ingredient, a peptide derived from an α-, β- or κ-casein or a combination thereof, and a pharmaceutically acceptable carrier for inducing hematopoietic stem cells proliferation and differentiation.

[0269] Further according to the present invention there is disclosed the use of a pharmaceutical composition comprising, as an active ingredient, a peptide derived from an α-, β- or κ-casein or a combination thereof, and a pharmaceutically acceptable carrier for inducing megakaryocytopoiesis.

[0270] Further according to the present invention there is disclosed the use of a pharmaceutical composition comprising, as an active ingredient, a peptide derived from an α-, β- or κ-casein or a combination thereof, and a pharmaceutically acceptable carrier for inducing erythropoiesis.

[0271] Further according to the present invention there is disclosed the use of a pharmaceutical composition comprising, as an active ingredient, a peptide derived from α-, β- or κ-casein or a combination thereof, and a pharmaceutically acceptable carrier for inducing leukocytopoiesis.

[0272] Further according to the present invention there is disclosed the use of a pharmaceutical composition comprising, as an active ingredient, a peptide derived from α-, β- or κ-casein or a combination thereof, and a pharmaceutically acceptable carrier for inducing thrombocytopoiesis.

[0273] Further according to the present invention there is disclosed the use of a pharmaceutical composition comprising, as an active ingredient, a peptide derived from an α-, β- or κ-casein or a combination thereof, and a pharmaceutically acceptable carrier for inducing plasma cell proliferation.

[0274] Further according to the present invention there is disclosed the use of a pharmaceutical composition comprising, as an active ingredient, a peptide derived from an α-, β- or κ-casein or a combination thereof, and a pharmaceutically acceptable carrier for inducing dendritic cell proliferation.

[0275] Further according to the present invention there is disclosed the use of a pharmaceutical composition comprising, as an active ingredient, a peptide derived from an α-, β- or κ-casein or a combination thereof, and a pharmaceutically acceptable carrier for inducing macrophage proliferation.

[0276] Further according to the present invention there is disclosed the use of a pharmaceutical composition comprising, as an active ingredient, a peptide derived from an α-, β- or κ-casein or a combination thereof, and a pharmaceutically acceptable carrier for preventing or treating thrombocytopenia.

[0277] Further according to the present invention there is disclosed the use of a pharmaceutical composition comprising, as an active ingredient, a peptide derived from an α-, β- or κ-casein or a combination thereof, and a pharmaceutically acceptable carrier for preventing or treating pancytopenia.

[0278] Further according to the present invention there is disclosed the use of a pharmaceutical composition comprising, as an active ingredient, a peptide derived from an α-, β- or κ-casein or a combination thereof, and a pharmaceutically acceptable carrier for preventing or treating granulocytopenia.

[0279] Further according to the present invention there is disclosed the use of a pharmaceutical composition comprising, as an active ingredient, a peptide derived from an α-, β- or κ-casein or a combination thereof, and a pharmaceutically acceptable carrier for preventing or treating hyperlipidemia.

[0280] Further according to the present invention there is disclosed the use of a pharmaceutical composition comprising, as an active ingredient, a peptide derived from an α-, β- or κ-casein or a combination thereof, and a pharmaceutically acceptable carrier for preventing or treating cholesteremia.

[0281] Further according to the present invention there is disclosed the use of a pharmaceutical composition comprising, as an active ingredient, a peptide derived from an α-, β- or κ-casein or a combination thereof, and a pharmaceutically acceptable carrier for preventing or treating glucosuria.

[0282] Further according to the present invention there is disclosed the use of a pharmaceutical composition comprising, as an active ingredient, a peptide derived from an α-, β- or κ-casein or a combination thereof, and a pharmaceutically acceptable carrier for preventing or treating diabetes.

[0283] Further according to the present invention there is disclosed the use of a pharmaceutical composition comprising, as an active ingredient, a peptide derived from an α-, β- or κ-casein or a combination thereof, and a pharmaceutically acceptable carrier for preventing or treating AIDS.

[0284] Further according to the present invention there is disclosed the use of a pharmaceutical composition comprising, as an active ingredient, a peptide derived from an α-, β- or κ-casein or a combination thereof, and a pharmaceutically acceptable carrier for preventing or treating infection by HIV.

[0285] Further according to the present invention there is disclosed the use of a pharmaceutical composition comprising, as an active ingredient, a peptide derived from α-, β- or κ-casein or a combination thereof, and a pharmaceutically acceptable carrier for preventing or treating conditions associated with myeloablative doses of chemoradiotherapy supported by autologous bone marrow or peripheral blood stem cell transplantation (ASCT) or allogeneic bone marrow transplantation (BMT).

[0286] Further according to the present invention there is provided a purified peptide having an amino acid sequence selected from the group consisting of SEQ ID NOs:1-33.

[0287] Further according to the present invention there is provided a pharmaceutical composition comprising a purified peptide having an amino acid sequence selected from the group consisting of SEQ ID NOs:1-33 and a pharmaceutically acceptable carrier.

[0288] The invention further relates to methods of treatment comprising the administration of, and pharmaceutical compositions comprising, combinations of peptides derived from α- β- and κ-casein. While reducing the present invention to practice, it was uncovered that combinations of peptides derived from αS1 casein and peptides derived from β-casein were more effective in enhancing leukocyte proliferation following bone marrow reconstitution in mice than the individual peptides administered alone (see FIG. 25). In one embodiment, the combination of peptides comprises a mixture of peptides. In a preferred embodiment, the combination of peptides comprises chimeric peptides covalently linked as described hereinabove.

[0289] The invention further relates to anti-viral pharmaceutical compositions comprising as active ingredient at least one peptide of the invention and to the use of the peptides of the invention as anti-viral agents. While reducing the present invention to practice, it was uncovered that peptides derived from natural casein have efficient immuno-modulatory activity that is completely free of any demonstrable side effects.

[0290] As described in detail in the Examples section hereinbelow, peptides derived from natural casein are capable of stimulating proliferation of various types of blood stem cells and can effectively enhance reconstitution of white blood cells and platelets even in patients who are completely resistant to platelet transfusion. Peptides derived from natural casein are effective in patients who are completely resistant to other modalities known to potentially enhance platelet reconstitution (including rhIL-3 and rhIL-6). Peptides derived from natural casein are an efficient immunomodulator capable of enhancing hematopoietic processes of different blood stem cells with a powerful effect on White Blood Cells (WBC), platelet reconstitution and stimulation of NK activity.

[0291] Thus, according to a further aspect of the present invention there is provided a method of treating or preventing a condition associated with a SARS infective agent, the method comprising administering to a subject in need thereof a therapeutically effective amount of a peptide derived from an N terminus portion of αS1 casein.

[0292] Further according to the present invention there is provided a pharmaceutical composition for preventing or treating a condition associated with a SARS infective agent, the pharmaceutical composition comprising, as an active ingredient, a peptide derived from an N terminus portion of αS1 casein and a pharmaceutically acceptable carrier. In a preferred embodiment the SARS infective agent is a coronavirus. In a most preferred embodiment the coronavirus is SARS-CoV.

[0293] It will be appreciated by one of ordinary skill in the art, that the efficacy of compositions of peptides derived from natural casein for prevention and/or treatment of conditions associated with SARS infective agent can be evaluated both in vitro and in clinical trials. Recently, Rota et al. (Sciencexpress, 1 May 2003, see www.sciencexpress.org) reported the characterization of the SARS-CoV virus, and successful in-vitro growth and isolation of SARS-CoV in Vero cells. Thus, for example, as described hereinbelow for HIV-1, Vero cells can be exposed to compositions of peptides derived from natural casein both prior to and following exposure to a SARS infective agent, and the levels of infection can be determined, for example, via measurement of viral specific transcripts, protein products or virion production using methods well known in the art.

[0294] As detailed hereinabove, the αS2, β, and κ-fractions of casein have been shown to contain peptides having advantageous biological properties. It will be appreciated that combinations of peptides derived from an α-, β- or κ-casein, and other identical or non-identical casein derived peptides (such as αS2-, β- and κ-casein) can have a synergistic effect on the modulation and enhancement of hematopoietic, immunological, EPO-, TPO-, G-CSF-mediated, anti-viral and other processes for which peptides derived from α-, β- or κ-casein have been shown herein to be effective. Thus, further according to the present invention there is provided a pharmaceutical composition comprising peptides derived from α-, β- or κ-casein in combination with other identical or non-identical peptides derived from α-, β- or κ-casein, wherein said combination is a mixture of peptides or a chimeric peptide.

[0295] While reducing the present invention to practice, a low-temperature method for processing casein hydrolysate at low temperatures was conceived. This novel method for the inactivation and removal of the protease following digestion of the casein, is superior in rapidity and ease, and without the undesirable disadvantages of traditional methods using heat inactivation. By replacing the high (>75° C.) heat inactivation step with cooling and alkalinization, effective and absolute inactivation of the proteases, with no danger to the peptides, was achieved.

[0296] Thus, according to a further aspect of the present invention there is provided a method of low-temperature processing of casein proteolytic hydrolysate, the method is effected by obtaining a casein proteolytic hydrolysate comprising proteolytic enzymes, cooling the casein proteolytic hydrolysate so as to inactivate the proteolytic enzymes, adjusting the pH of the casein protein hydrolysate to an acid pH, filtering the acidic casein protein hydrolysate and collecting the filtrate. Methods for batch cooling of the casein hydrolysate, following proteolytic digestion, are well known in the art (see, for example, industrial fermentor and bioreactor temperature control systems from BioGenTek, New Delhi, India) and in the dairy products industry (suitable heat exchange systems for large and small volume applications are widely available commercially).

[0297] The filtrate is then further acidified so as to precipitate the proteins derived from natural casein, separated and collected, and then the pH of the precipitate is adjusted to an alkaline pH with a base such as NaOH, so as to irreversibly inactivate the proteolytic enzymes. Following inactivation of the proteolytic enzymes, the pH of the precipitate is readjusted with acid, such as HCl, to pH 7-9, thereby processing the casein protein hydrolysate at low temperature. In a preferred embodiment, the casein hydrolysate is cooled to about 10° C., most preferably to 8-10° C. Temperature is maintained at 10° C. by addition of cold TCA, and centrifugation at a temperature less than 10° C.

[0298] In a further embodiment, the pH is adjusted to acid pH by addition of acid to 2% (w/v) acid, and further acidifying the filtrate is effected by additional addition of acid to about 10% (w/v) acid. In a preferred embodiment, the alkaline pH of the precipitate is adjusted with a base to at least pH 9, preferably pH 10, most preferably pH 13. In preferred embodiment, alkaline pH is maintained for greater than 15 minutes, more preferred for greater than 30 minutes, and in a most preferred embodiment greater than 1 hour. Monitoring of the residual proteolytic activity following cooling and alkaline treatment, can be used to determine the optimal range of alkaline treatment.

[0299] As used herein, the term “about” is defined as the range comprising from 20% greater than to 20% lees than the indicated value. Thus, the phrase “about 10° C.”, as used herein, includes the range of temperatures from 8° C. to 12° C. Similarly, the phrase “about 10% (w/v) acid” includes the range of acid content from 8% w/v to 12% w/v.

[0300] The present invention successfully addresses the shortcomings of the presently known configurations by providing peptides for the treatment of human disease, which peptides are derived from an α-, β- or κ-casein, alone or in combination with other identical or non-identical peptides derived from α-, β- or κ-casein, and posses no detectable toxicity and high therapeutic efficacy.

[0301] Additional objects, advantages, and novel features of the present invention will become apparent to one ordinarily skilled in the art upon examination of the following examples, which are not intended to be limiting. Additionally, each of the various embodiments and aspects of the present invention as delineated hereinabove and as claimed in the claims section below finds experimental support in the following examples.

### EXAMPLES

[0302] Reference is now made to the following examples, which together with the above descriptions, illustrate the invention in a non limiting fashion.

### Materials and Experimental Methods

[0303] Preparation of peptides derived from natural casein: The casein fraction of cow's milk was isolated as described by Hipp et al. (1952), ibid., or provided as commercial casein, and subjected to exhaustive proteolytic digestion with chymosin (also known as rennin) (20 ng per ml) at 30° C. Upon completion of the reaction, the solution was heated to inactivate the enzyme, and the digest was precipitated as paracaseinate by acidification with an organic acid, acetic or trichloracetic acid. Paracaseinate was separated by centrifugation, and the supernatant fraction, containing the peptide fragments of interest, was re-precipitated as caseicidin by higher acid concentrations. The resulting caseicidin, following re-suspension, dialysis and neutralization was lyophilized. The resulting powdered preparation was assayed for biological activity as described below, and separated by HPLC for peptide analysis.

[0304] Alternatively, the caseicidin can be prepared by cooling and alkaline treatment. Following digestion of the casein, the reaction mixture was cooled immediately to below 10° C. and cold TCA (Tri-chloro acetic acid) was added to obtain a 2% TCA solution. The solution was separated by centrifugation at 1370 ×g, at a temperature less than 10° C.

[0305] The supernatant was removed and filtered. Additional cold TCA was added to obtain a 10%-12.5% TCA solution. The solution was centrifuged at 1370 ×g, at a temperature below 10° C. The precipitate was removed and dissolved in H₂O and made alkaline by a strong base, such as, for example, NaOH, to increase the pH of the hydrolysate to pH 9-13. The solution was maintained at basic pH between 15 min to 1 hour. Subsequently, the solution was acidified to pH 7-9 by addition of an acid such as HCl. The resultant mixture of peptides was further fractionated and purified by gel filtration on a dextran column (such as Sephadex), as described herein, or by diafiltration on a series of rigid membranes, for example, using a first diafiltration apparatus with a 10 kDa cutoff, and a second diafiltration apparatus with a 3 kDa cutoff (Millipore, Billerica, Mass., USA).

[0306] HPLC analysis of peptides derived from natural casein: Peptides derived from natural casein as described above were analyzed by HPLC in two stages. Initially, the lyophilized casein digests were separated using a C 18 reversed phase with a 0.1% water triflouroacetic acid (w/w)—acetonitrile gradient. Detection was according to UV absorption at 214 nm. Following this the samples were analyzed by HPLC-Mass Spectroscopy (MS) equipped with an electrospray source. Mass calculations represent the mass of the ionized peptide samples, as derived from the retention times. Following separation, the amino acid composition of the peptides was determined with a gas-phase microsequencer (Applied Biosystems 470A).

[0307] Analysis of some preparations of peptides derived from natural casein produced the following results: Eight peptide peaks were typically observed of which 3 were major peaks having Rt values of 17.79, 19.7, 23.02 and 5 were minor peaks having Rt values of 12.68, 14.96, 16.50, 21.9 and 25.1, which Rt values represent molecular mass of 2764, 6788, 1880, 2616, 3217, 2333, 6708 and 6676 Da, respectively. At Rt of 17.79 (corresponding to 2,764 Da) a major peak of a peptide of 23 amino acids representing amino acids 1-23 of αS1 casein, having the sequence RPKHPIKHQGLPQEVLNENLLRF (SEQ ID NO:22, see McSweeny et al., 1993, ibid., for the complete sequence of αS1 casein). Other peptides were from positions 208-224 of β-like casein precursor, positions 16-37 of αS1 casein and positions 197-222 of αS2-like casein precursor. Other peptides were also present. Peptides derived from natural casein were further analysed with HPLC-MS (C-18 resin) and sequenced using MS/MS and Edman degradation. The column used was Vydac C-18, and the elution was carried out with a gradient starting with 2% CH₃CN, 0.1% TFA and continues by increasing modifier (2% H₂O, 0.1% TFA in CH₃CN) up to 80% at 80 min. Mass Spectrometry was carried out with Qtof2 (Micromass, England), using a nanospray attachment.

[0308] Edman degradation was carried out using a Perkin Elmer (Applied Biosystems Division) 492 (procise) Microsequencer system. Further HPLC-MS was also carried out using a C-12 resin. Analysis of peptides derived from natural casein revealed three major components:

[0309] i) a peptide representing an N-terminal portion of αS1 casein, amino acid coordinates 1-23 of the processed peptide (SEQ ID No: 22). Molecular mass is 2764 daltons.

[0310] ii) a peptide representing amino acid coordinates 193-209 of β casein (SEQ ID No. 27). Molecular mass is 1880 daltons.

[0311] iii) a peptide representing amino acid coordinates 106-169 of κ casein (SEQ ID No. 29). Molecular mass is 6708 daltons. The κ casein was found in two forms: a phosporylated form, and an un-phosphorylated form. The molecular mass of the phosphorylated peptide is 6789 daltons. Further there was identified a known variant of κ casein, whose molecular mass is 6676 Da (non-phosphorylated). Three minor components were identified:

[0312] i) a peptide representing an N-terminal portion of αS1 casein, amino acid coordinates 1-22 of the processed peptide (SEQ ID No: 21). Molecular mass is 2616 daltons.

[0313] ii) a peptide representing amino acid coordinates 165-199 of αS1 casein (SEQ ID No. 31). Molecular mass is 3918 daltons.

[0314] iii) a peptide representing amino acid coordinates 182-207 of αS2 casein (SEQ ID No. 32). Molecular mass is 3217 daltons.

[0315] iv) a peptide representing amino acid coordinates 189-207 of αS2 casein (SEQ ID No. 33). Molecular mass is 2333 daltons.

[0316] Minor peptides representing portions of the N-terminal of β casein, and other portions of bovine casein were also detected.

[0317] Gel filtration of peptides derived from natural casein:

[0318] Peptides derived from natural casein, prepared as described hereinabove, were separated according to molecular mass by gel filtration using Superdex75 Gel filtration column by Pharmacia. The elution buffer used for the preparative separation was NH₄HCO₃, pH=8. The following purified fractions were obtained: a peptide representing amino acid positions 1-23 of the N-terminus of αS1 casein (SEQ ID No. 22), and a second peptide representing amino acid positions 106-169 of κ-casein (SEQ ID No. 29). Without wishing to be limited by a single hypothesis, one explanation for the apparent discrepancy between the analyses of the peptides derived from natural casein by the HPLC, HPLC MS and gel filtration methods is the tendency of gel filtration to retard specific components of a mixture of peptides.

[0319] Synthetic peptides derived from casein: Peptides of increasing lengths corresponding to the N-terminal 2-26 amino acids of αS1 casein were synthesized by NoVetide Ltd., Haifa, Israel, with purity of >95% (HPLC). Quality Control included: HPLC, Mass Spectrometry (EI), Amino acid analysis and Peptide Content. Table 3 below provides the sequence of these peptides:

TABLE 3

| | |
|---|---|
| No. of | SEQ |

| | | |
|---|---|---|
| Sequence | amino | ID |

| | | | |
|---|---|---|---|
| Identification | (N terminus-C terminus) | acids | NO: |

| | | | |
|---|---|---|---|
| 74 | RP | 2 | 1 |
| 1P | RPK | 3 | 2 |
| 2P | RPKH | 4 | 3 |
| 3P | RPKHP | 5 | 4 |
| 4P | RPKHPI | 6 | 5 |
| 5P | RPKHPIK | 7 | 6 |
| Y | RPKHPIKH | 8 | 7 |
| X | RPKHPIKHQ | 9 | 8 |
| 1a | RPKHPIKHQG | 10 | 9 |
| 2a | RPKHPIKHQGL | 11 | 10 |
| 3a | RPKHPIKHQGLP | 12 | 11 |
| A | RPKHPIKHQGLPQ | 13 | 12 |
| B | RPKHPIKHQGLPQE | 14 | 13 |
| C | RPKHPIKHQGLPQEV | 15 | 14 |
| D | RPKHPIKHQGLPQEVL | 16 | 15 |
| E | RPKHPIKHQGLPQEVLN | 17 | 16 |
| F | RPKHPIKHQGLPQEVLNE | 18 | 17 |
| G | RPKHPIKHQGLPQEVLNEN | 19 | 18 |
| H | RPKHPIKHQGLPQEVLNENL | 20 | 19 |
| I | RPKHPIKHQGLPQEVLNENLL | 21 | 20 |
| J | RPKHPIKHQGLPQEVLNENLLR | 22 | 21 |
| K | RPKHPIKHQGLPQEVLNENLLRF | 23 | 22 |
| L | RPKHPIKHQGLPQEVLNENLLRFF | 24 | 23 |
| M | RPKHPIKHQGLPQEVLNENLLRFFV | 25 | 24 |
| N | RPKHPIKHQGLPQEVLNENLLRFFVA | 26 | 25 |
| β 193-208 | YQEPVLGPVRGPFPII | 16 | 28 |
| κ 106-127 | MAIPPKKNQDKTEIPTINTIAS | 22 | 30 |

[0320] Juvenile (Type I, IDDM) diabetes in Non-Obese Diabetic (NOD) mice:

[0321] Peptides derived from natural casein: NOD mice are a commonly used model for research of autoimmune disease and human Juvenile Diabetes. Six week old female NOD mice received either one or two injections per week of 100 μg of peptides derived from natural casein, for a total of 5 or 10 treatments. Control mice received no treatment. The severity of disease was determined according to glucosuria, which was measured using Combi test sticks [Gross, D. J. et al. (1994), Diabetology, 37:1195]. Results were expressed as the percent of glucosuria-free mice in each sample over a 365-day period.

[0322] Synthetic peptides derived from casein: In another experiment, 6 week old female NOD mice received two injections per week of 100 μg of Synthetic peptides derived from casein for a total of 10 treatments, or three injections of 1 mg each, 3 days apart, for a total of 3 treatments. Control mice received no treatment. Results were expressed as the number of healthy mice in the various treated groups.

[0323] Intraperitoneal Glucose Tolerance Test (IPGTT): The glucose tolerance test is the definitive method for investigating glucose metabolism and diabetic tendencies in mammals. Twenty five (25) weeks after receiving Synthetic peptides derived from casein, response to a glucose load was assessed with an intraperitoneal glucose tolerance test. Glucose injection consisted of 1 g/kg body weight. Glycemic values were determined from blood drawn prior to test (0 minutes) and 60 minutes after loading. Plasma glucose levels were determined with a Glucose Analyzer 2 (Beckman Instruments, Fullerton, Calif.) and expressed as mmol/L. Normal values do not exceed 140 mmol/L.

[0324] Stimulation of proliferation of Natural Killer (NK) cells:

[0325] From human Peripheral Blood Stem Cells (PBSC): PBSC of G-CSF treated subjects were separated on a FICOLL gradient, washed twice with RPMI-1640 medium containing 10% FCS and glutamine, and seeded into 1.5 ml wells with or without peptides derived from natural casein or synthetic peptides derived from casein, as indicated, (0-500 μg per ml). Following two days incubation the cells were assayed for Natural Killer activity by measuring radioactivity released from ³⁵S-labeled K562 target cells (NEG-709A, 185.00 MBq, 2.00 mCi EASYTAGth Methionine, L-[³⁵S] 43.48 TBq per mmol, 1175.0 Ci per mmol, 0.488 ml, Boston USA). Two concentrations of effector cells (2.5×10⁵ and 5×10⁵ cells per well) were incubated with 5×10³ target cells per well (effector:target cell ratios of 50:1 and 100:1, respectively) in U-bottomed 96 well tissue culture plates. The cells were incubated for 5 hours at 37° C. in 5% CO₂, 95% air and precipitated by 5 minutes centrifugation at 1000 rpm. ³⁵S release was measured in 50 μl samples of the supernatant liquid.

[0326] From murine Bone Marrow (BM) cells: Bone marrow was collected from 4 untreated BALB/c and C57B1/6 mice. Bone marrow was harvested from the long bones of front and hind limbs of the mice by injection of medium using a 25 Gauge needle. Aspirated cells were washed with RPMI 1640, counted in a haemocytometer and vital-stained (20 μl of cells in 380 μl acetic acid/trypan blue), then seeded in culture bottles at 2-5×10⁶ cells per ml in RPMI-1640 containing 10% Fetal Calf Serum, antibiotics and glutamine with or without 100 μg per ml peptides derived from natural casein. The cell cultures were incubated in 5% CO₂, 95% air for 12-15 days at 37° C., harvested by 10 minutes centrifugation at 1500 rpm, counted, and seeded in U-bottom wells with ⁵¹Cr (Chromium-51, 740 MBq, 2.00 mCi activity) or ³⁵S (NEG-709A, 185.00 MBq, 2.00 mCi EASYTAGth Methionine, L-[³⁵S] 43.48 TBq per mmol, 1175.0 Ci per mmol, 0.488 ml, Boston USA) labeled murine lymphoma (YAC) cells at either 25:1 or 50:1 effector:target cell ratio. NK activity is expressed as the percent radioactivity in the cell-free supernatants.

[0327] Proliferation of human cells in culture: Peripheral blood (PB) was collected from healthy or affected patients. Affected patients received no treatment other than G-CSF supplementation prior to plasmapheresis. Bone marrow (BM) cells were collected from consenting healthy patients or affected patients in remission following chemotherapy by aspiration. Umbilical cord blood was collected during normal births. Human cells of the various origins were separated on a FICOLL gradient, washed twice with RPMI-1640 medium, and seeded into 0.2 ml flat bottom tissue culture wells at the indicated concentrations with or without peptides derived from natural casein or with or without synthetic peptides derived from casein, as indicated. All treatments, including controls, were repeated in triplicate. Cell proliferation was measured by ³HT incorporation: radioactive thymidine was added [thymidine (methyl-[³H]) Specific activity 5 Ci per ml 37 MBq per ml, ICN Corp.] following incubation for the indicated number of days. Cells were then incubated 16-20 hours with the label, harvested and washed with medium. Incorporated radioactivity was measured in a β scintillation counter.

[0328] Proliferation of K562 leukemia and colon cancer cell lines: Colon and K562 are established lines of cancer cells grown in culture. Both cell lines were grown in culture bottles in 5% CO₂, 95% air at 37° C., harvested and washed with medium before seeding in tissue culture wells at 4×10⁵ cells (K562) or 3×10³ cells (Colon) per well. Peptides derived from natural casein were added to the wells, at the indicated concentrations, and after 9 (K562) or 3 (Colon) days of incubation labeled thymidine was added as described above. Harvesting and measurement of radioactive uptake was as described above.

[0329] Fluorescent antibody detection of NK and T Cell proliferation in human Peripheral Blood Stem Cells (PBSC):

[0330] Peripheral Blood Stem cells (PBSC) from human subjects receiving G-CSF treatment were collected by plasmapheresis, separated on a FICOLL gradient, washed twice with RPMI-1640 medium containing 10% Fetal Calf Serum and incubated in culture bottles at 37° C. in 5% CO₂, 95% air with or without peptides derived from natural casein at the indicated concentrations. Following 10, 14 or 28 days incubation with peptides derived from natural casein, the presence of T cells (CD₃ surface antigen) and NK cells (CD₅₆ surface antigen) was detected by direct immunofluorescence using anti-CD₃ fluorescent antibody (CD₃/FITC clone UHCT₁), anti-CD₅₆ fluorescent antibody (CD₅₆/RPE clone MOC-1) (DAKO A/S, Denmark) and mouse IgG1/RPE and IgG1/FITC antibodies as a control. Detection of fluorescently tagged cells was performed using fluorescence activated cell sorting (FACS).

[0331] Stimulation of hematopoiesis from Bone Marrow (BM) Cells in culture:

[0332] Proliferation of megakaryocytes in multipotential colonies (CFU-GEMM) from murine Bone Marrow cells: Primary bone marrow cells (1×10⁵ per ml) from 8-12 week-old C3H/HeJ mice were grown in serum-free methyl cellulose-IMDM medium for 8-9 days at 5% CO₂, 95% air, at 37° C. The medium, appropriate for the growth of multipotential colonies (CFU-GEMM), contained 1% BSA (Sigma), 10⁻⁴ M thioglycerol (Sigma), 2.8×10⁻⁴ M human transferrin (TF, Biological industries, Israel), 10% WEHI-CM as a source of IL-3 and 2 units per ml erythropoietin (rhEPO, R & D Systems, Minneapolis). Colonies were scored after 8-9 days using an Olympus dark field microscope. They were picked with a micropipette, cytocentrifuged and stained with May-Grunwald-Giemsa for differential counts. At least 700 cells were counted for each preparation.

[0333] Proliferation of Dendritic cells in CFU-GEMM: Multipotent (CFU-GEMM) colonies grown from primary bone marrow cells as described for the assay of megakaryocyte proliferation above were collected, stained and counted for dendritic cells. At least 700 cells were counted for each preparation.

[0334] Proliferation of Plasma cells in CFU-GEMM: Multipotent (CFU-GEMM) colonies grown from primary bone marrow cells as described for the assay of megakaryocyte proliferation above were collected, stained and counted for plasma cells. At least 700 cells were counted for each preparation.

[0335] Proliferation of Macrophage cells in CFU-GEMM: Multipotent (CFU-GEMM) colonies grown from primary bone marrow cells as described for the assay of megakaryocyte proliferation above were collected, stained and counted for macrophage cells. At least 700 cells were counted for each preparation.

[0336] Proliferation of Red Blood Cells in CFU-GEMM: Multipotent (CFU-GEMM) colonies grown from primary bone marrow cells as described for the assay of megakaryocyte proliferation above were collected, stained and counted for red blood cells. At least 700 cells were counted for each preparation.

[0337] Proliferation of Polymorphonuclear Cells (PMN) in CFU-GEMM: Multipotent (CFU-GEMM) colonies grown from primary bone marrow cells as described for the assay of megakaryocyte proliferation above were collected, stained and counted for polymorphonuclear cells. At least 700 cells were counted for each preparation.

[0338] Proliferation of megakaryocyte- and erythroid forming cells from human bone marrow and cord blood cells: A sample of bone marrow from an apparently healthy human being was processed by density gradient separation using Histopaque-107 (Sigma Diagnostics) to obtain a purified population of mononuclear cells (MNC). Colony assays were performed in a plating medium containing final concentrations of 0.92% methyl cellulose (4000 centripase powder, Sigma Diagnostic), rehydrated in Iscoves modified Dulbecco's medium containing 36 mM sodium bicarbonate (Gibco), 30% fetal bovine serum (FBS) (Hyclone), 0.292 mg/ml glutamine, 100 units per ml penicillin and 0.01 mg per ml streptomycin (Biological Industries, Beit Haemek). Cord blood from normal births was collected and prepared as mentioned above.

[0339] Colony assay medium containing 10⁵ MNC per ml was plated in triplicate wells within a 24 well tissue culture plate (Greiner), 0.33 ml per well. The cultures were incubated at 37° C. in 5% CO₂, 95% air and 55% relative humidity with or without peptides derived from natural casein or synthetic peptides derived from casein, at the indicated concentrations. Plates were scored after 14 days for colonies containing more than 50 cells. Megakaryocytes were identified by indirect immunofluorescence using a highly specific rabbit antibody recognizing human platelet glycoproteins, and an FITC-conjugated goat anti-rabbit IgG. Added growth factors included 15 ng per ml leucomax (GM-CSF) (Sandoz Pharma), and 5% vol. per vol. human phyto-hemagglutinin-m (Difco Lab)-induced conditioned medium (CM) to induce development of granulocyte macrophage colonies (CFU-GM). Erythropoietin (EPO) 2 units/ml was used to induce formation of erythroid colonies (burst-forming unit-erythroid-BFU-E).

[0340] Alternatively, human bone marrow cells from consenting volunteer donors or patients undergoing autologous bone marrow transplantation were precultured in medium containing 10-1000 μg per ml peptides derived from natural casein, grown in semi-solid agar, and scored for granulocyte-macrophage hematopoietic colonies (GM-CFU) at 7 or 14 days post treatment.

[0341] Megakaryocytopoiesis was measured in normal bone marrow cells from healthy consenting human donors by either scoring of the number of megakaryocytes in samples of liquid culture (RPMI-1640 plus 10% human AB serum, glutamine and antibiotics) with or without 100 μg per ml peptides derived from natural casein, or in a methylcellulose assay for assessing colony formation. 2×10⁵ bone marrow cells were seeded in the presence of a standard growth factor combination with or without peptides derived from natural casein. In the methylcellulose assay megakaryocytes were counted with an inverted microscope on days 12-14 after seeding.

[0342] Clinical trials using peptides derived from natural casein: In one series of trials, a single dose containing 50 mg peptides derived from natural casein was administered intra-muscular to human subjects in 3 depots, over a period of 2 hours. Clinical parameters were monitored at the indicated intervals. In other trials, patients at various stages of treatment for and/or remission from cancer and metastatic disease received peptides derived from natural casein once or twice, and were monitored for changes in the cell count of peripheral blood.

[0343] Inhibition of in vitro HIV infection of human lymphocyte cells:

[0344] Peptides: Peptides (either peptides derived from natural casein or synthetic peptides derived from casein (2-26 amino acids in length, see table 3) supplied as lyophilized powder were resuspended in RPMI complete medium and added to cell cultures at a final concentrations of 50 to 1000 μg per ml.

[0345] Cells: Several types of freshly isolated human cells (primary cells) and cell lines are known to be susceptible to in vitro HIV-1 infection, although essentially any cell displaying even low surface levels of the CD₄molecule can be considered a potential target for HIV-1 infection. Two commonly used human cell lines which are highly sensitive for HIV-1 infection were chosen, CEM and Sup-T1.

[0346] CEM is a human T4-lymphoblastoid cell line initially derived by G. E. Foley et al. [(1965), Cancer 18:522] from peripheral blood buffy coat of a 4-year old caucasian female with acute lymphoblastic leukemia. These cells were continuously maintained in suspension in medium, and have been used widely for analysis of infectivity, antiviral agents and neutralizing antibodies.

[0347] Sup-T1 is a human T-lymphoblastoid cell line isolated from a pleural effusion of an 8-year old male with Non-Hodgkin's T-cell lymphoma [Smith, S. D. et al. [(1984) Cancer Research 44:5657]. This cell expresses high levels of surface CD₄ and is useful in studies of cell fusion, cytopathic effect and infectivity of HIV-1. Sup-T1 cells are grown in suspension in enriched medium.

[0348] Medium: Cells were grown in RPMI-1640 complete medium enriched with 10% Fetal bovine serum, 2 mM glutamine and 2 mM penicillin-streptomycin (GIBCO).

[0349] Virus: The HIV virus strain employed was HIV-1IIIB, originally designated HTLV-IIIB. Concentrated culture fluids of peripheral blood from several patients with AIDS or related diseases were used to establish a permanent productive infection in H-9 cells. This subtype B virus has high capacity to replicate in human T-cell lines. Viral titer was 5.38 ng per ml in stock solution.

[0350] FITC-labeled peptides: FITC F-1300 (Fluorescein isothiocyanate, isomer I, Sigma (F25o-2) St. Louis, Mich., USA) having excitation/emission maxima of about 494/520 nm, respectively, was employed. The amine-reactive fluorescein derivative is probably the most common fluorescent derivatization reagent for covalently labeling proteins. FITC-conjugated peptides derived from natural casein were prepared by covalent binding of FITC to the amine groups of lysine.

[0351] HIV-1 P²⁴ antigen capture assay: An HIV-1 P²⁴ Antigen capture assay kit employed was designed to quantitate the HIV-1 P²⁴ core antigen, which is proportionally related to the degree of viral production in cells. This kit was purchased from the AIDS Vaccine program of the SAIC-NCI-Frederick Cancer Research Institute, P.O. Box B, Frederick, Md. 21702, USA and included 96 well plates coated with monoclonal antibody to HIV-1 P²⁴, primary antibody-rabbit anti-HIV P²⁴ serum, secondary antibody-Goat anti-rabbit-IgG (H+ L) peroxidase conjugated antibody, TMB peroxidase substrate system and lysed HIV-1 P²⁴ standard. The HIV-1 P²⁴ antigen capture assay was analyzed by Organon-Technica ELISA reader at 450 nm with a reference at 650 nm.

[0352] HIV-1 P²⁴ antigen capture ELISA: HIV infection was measured with an indirect enzyme immunoassay which detects HIV-1 P²⁴ core antigens in tissue culture media. Tissue culture supernatant was reacted with primary rabbit anti-HIV-1 P²⁴ antigen and visualized by peroxidase conjugated goat anti rabbit IgG. The reaction was terminated by adding 4N H₂SO₄, wherein the intensity of the color developed is proportional to the amount of HIV-1 antigen present in the tissue culture supernatant.

[0353] Biological hazard level 3 (BL-3) laboratory: All virus production isolation and infection, tissue culture of HIV-1 infected cells, P²⁴ antigen containing supernatant harvesting and P²⁴ antigen capture ELISA, were performed in BL-3 facility and were in accordance with the bio safety practices set by the NIH and CDC (USA).

[0354] Flow cytometry: A FACSort cell sorter (Becton & Dickinson, San Jose, Calif. USA) was used to (i) determine the percentage of CD₄ positive CEM and sup-T1 cells batches before infection with HIV-1 in order to assure the same degree of infection in each experiment; and (ii) detect T cells that harbor FITC conjugated peptides derived from natural casein in their cytoplasm and nuclei.

[0355] CO₂ incubator: For viral culture production cells with HIV-1, cells and virus pretreated with peptides derived from natural casein and cells which were further incubated with HIV-1, were all kept in humidified CO₂ incubator for the duration of the experiment.

[0356] HIV infection of human cultured CD4 cells: For longer incubations, the cells (CEM, Sup-T1) were preincubated with several increasing concentrations of peptides derived from natural casein (50-1000 μg per ml) or synthetic peptides derived from casein (10-500 μg per ml) for 24 (for synthetic and natural peptides) and 48 (only for natural peptides) hours and HIV-1IIIB (45 pg per ml final concentration) was added to each well thereafter. For the shorter incubations (3 hours), HIV-1IIIB was preincubated with the peptides for 3 hours and then added to cells (5000 cells/well) in tissue culture plates. Controls were IF (Infected, cells cultured with HIV-1 and without peptides), UIF (Uninfected, cells cultured without HIV-1 and without peptides) and UIF+Ch (Uninfected+peptides derived from natural casein, cells cultured in the presence of peptides derived from natural casein {50-1000 μg per ml}) to test the effect of peptides derived from natural casein and synthetic peptides derived from casein on cell viability and growth. Cells were counted for viability and proliferation rate on day 7, 10 and day 14 post infection (the day of P²⁴ antigen culture supernatant harvest). Cells and tissue culture supernatants (media) were harvested and lysed immediately in 1/10 volume of 10% Triton X-100. These samples were further incubated at 37° C. for 1 hour and kept at −80° C. until tested for P²⁴ antigen.

[0357] Confocal microscopy: A Zeiss LSM 410 confocal laser scanning system attached to TW Zeiss Axiovert 135M inverted microscope, employing the laser scanning confocal microscopy technique, was used to detect penetration of FITC conjugated peptides into cells. T cells were incubated with FITC conjugated peptides derived from natural casein in a 5% CO₂, 95% air, 37° C. incubator, after which the cells were washed 3 times with phosphate buffer saline (PBS) to remove unbound FITC-peptides. Cells were fixed with 3.8% formalin for 10 minutes, washed twice with PBS and resuspended in 50-100 μl PBS before viewing the cells under the microscope. Selected images of cells from different time points of incubation (15 minutes, 30 minutes, 1 hour, 1.5 hour and 3 hours) displaying various amounts of FITC-peptides derived from natural casein in their cytoplasms and nuclei were stored on 3.5″ Zip drive (230 MB) and processed for pictures using Photoshop software.

[0358] [³H]-thymidine incorporation test: In order to test the effect of peptides derived from natural casein on T cell proliferation, several concentrations of peptides derived from natural casein (10 mg/ml stock in RPMI) were added to Sup-T1 cell cultures in 96 flat bottom microwell plate (5000 cells/well), as described for HIV-1 infection in Sup-T1 cells. Cells were counted and their viability was determined by trypan blue dye exclusion. They were pulsed with [³H]-thymidine at each time point (3, 7, 10 and 14 days) for 18 hours (over night) and harvested on glass fiber filters for radioactivity reading (Incorporation of [³H]-thymidine into cellular DNA is proportional to degree of cell proliferation).

[0359] Toxicity of peptides derived from natural casein in normal, myeloablated and transplant recipient mice and guinea pigs: Intramuscular, or intravenous injections of up to 5,000 mg peptides derived from natural casein per kg animal were administered in a single dose, or in three doses to normal animals. A variety of strains were employed, including BALB/c, C3H/HeJ and Non-Obese Diabetic (NOD) mice. The mice were either monitored for 10 months before sacrifice and post-mortem examination (toxicity assay) or observed for 200 days (survival rate). Guinea pigs received a single intramuscular injection of 20 mg peptides derived from natural casein per animal. Fifteen days later they were sacrificed and examined for pathology.

[0360] Leukocyte and platelet reconstitution in bone marrow transplant recipient mice: BALB/c mice were sub-lethally irradiated at a source to skin distance of 70 cm, dosage of 50 cGy per minute, for a total of 600 cGy. The irradiated mice were reconstituted with syngeneic bone marrow as described above and injected intravenously 24 hours later with 1 mg per animal peptides derived from natural casein, synthetic peptides derived from casein (13-26 amino acids, see Table 3 above), or human serum albumin (controls), following a double-blinded protocol. Leukocyte reconstitution was determined according to cell count in peripheral blood collected at indicated intervals from 6 to 12 days post treatment. Platelet reconstitution was determined by cell count in blood collected from the retro orbital plexus, into EDTA-containing vials, at indicated intervals from day 6 to day 15 post treatment.

[0361] In an additional series of experiments, CBA mice were lethally irradiated (900 cGy), reconstituted with BM cells and treated with peptides derived from natural casein or human serum albumin as described above. Platelet reconstitution was assayed as mentioned above.

[0362] In a third series of experiments, the mice were irradiated (800 cGy), reconstituted and injected intraperitoneally with 1.0 mg synthetic peptides derived from casein (peptides 3a and 4P, representing the first 6 and 12 amino acids of the N terminus of αS1 casein, respectively—see Table 3 above) daily, on days 4, 5, 6 and 7 post-transplantation. Platelet reconstitution was assayed at 10 and 12 days post-transplantation.

[0363] In a fourth series of experiments, F1 mice were irradiated (750 cGy), reconstituted with syngeneic bone marrow, and injected intravenously 24 hours later with 1 mg per mouse of synthetic peptides derived from casein representing amino acids 193-208 of β-casein and amino acids 1-22 of the N terminus of αS1 casein. In addition, 2 (two) groups of mice were treated each with a natural fraction of αS1 casein position 1-23, and a fraction of peptides derived from natural K-casein, representing amino acid coordinates 106-169 of κ-casein (SEQ ID No. 30). WBC counts were conducted on days 5, 7, 10 and 12 post-transplantation.

[0364] Reconstitution of bone marrow transplant recipient mice and enhancement of bone marrow cell proliferation in donor mice:

[0365] C57B1/6 mice were lethally irradiated at a source to skin distance of 70 cm, dosage of 50 cGy per minute, for a total of 900 cGy. The irradiated mice were reconstituted with syngeneic bone marrow cells from mice which were either treated a day prior to bone marrow collection with 1 mg per animal peptides derived from natural casein or with saline (controls), following a double-blinded protocol. In one experiment mice survival was monitored for 18 days. In another experiment mice were sacrificed after 8 days and spleen colonization monitored.

[0366] Synthetic peptides derived from casein significantly reduce Cholestrol levels:

[0367] The ability of synthetic casein derived peptides to reduce cholesterol levels in 7-week old female C57B1/6j mice was assessed after feeding an atherogenic diet. The mice were divided into groups of 8. One control group was fed a normal diet. A second control group was fed the modified Thomas Hartroft diet containing cholate (#TD 88051: Teklad, Madison, Wis.) [Gerber, D. W. et al., Journal of Lipid Research. 42, 2001]. The remaining experimental groups were all fed the modified Thomas Hartroft diet. After one week on the diet, serum cholesterol values increased significantly and the synthetic peptides derived from casein were injected intraperitoneally, 1 mg per mouse, followed by a second injection of 0.1 mg one week later.

[0368] Cholestrol blood levels were determined according to Roche Cholesterol Assay based on Roeschlou & Allin enzymatic method (Roche, Inc., Germany).

### Experimental Results

[0369] Peptides derived from natural casein: Originating from the observation that curdled milk occasionally failed to support bacterial growth, a casein fragment possessing bacteriocidal properties was isolated from milk proteins (U.S. Pat. No. 3,764,670 to Katzirkatchalsky, et al.). Crude peptides derived by proteolysis of natural casein were prepared by acid precipitation of the soluble fraction of the casein proteolytic digest, dialysis and lyophilization. When tested for biological activity after extended storage, it was noted that this crude preparation, when lyophilized and stored at 4° C., remained active (in vitro and in vivo) for at least 24 months.

[0370] Low Temperature-Processed Peptides from natural casein: Preparation of the casein hydrolysate according to traditional methods, such as that described by Hill et al., requires high temperature (>75° C.) inactivation of the proteolytic enzymes, a time consuming process resulting in irreversible denaturation of the large amounts of proteolytic enzymes required for the production of Peptides from natural casein, and potential unknown effects on the hydrolysate itself. While reducing the present invention to practice, it was surprisingly discovered that the proteolytic process producing peptides from natural casein can be terminated more efficiently, by a novel, simplified method comprising cooling, alkaline treatment, and subsequent acidification.

[0371] In a representative preparation, and to compare Low-Temperature Processing with the conventional heat treatment, a 1.7% casein solution prepared as described hereinabove was subjected to proteolytic digestion with a proteolytic enzyme (for example, chymosin (known also as renin) either as crystalline renin or commercial chymosin of non-animal source. Other proteolytic enzymes, as pepsin, can also be used).

[0372] 20 ng of the enzyme was added per each ml of the 1.7% casein solution. Proteolytic digestion of the casein was completed after 14.5 hours at 30° C.

[0373] At the completion of the reaction, the reaction mixture was cooled immediately to below 10° C., made 2% with cold TCA (Tri-chloro acetic acid), and maintained below 10° C. Following removal and filtration of the resulting supernatant, which still contained most of the peptides derived from natural casein, the supernatant was made 10-12.5% in cold TCA, and centrifuged at 1370×g at below 10° C.

[0374] The resulting precipitate comprising peptides derived from natural casein was removed and dissolved in H₂O and made strongly basic (pH 9-13) with an alkaline solution. The solution was kept at this basic pH between 15 minutes to 1 hour, and then acidified with HCl, to a final pH of between pH 7-9. Further purification of peptides was performed by gel filtration or diafiltration, as described hereinabove.

[0375] Surprisingly, it was observed that maintaining the solution at an alkaline pH (between pH 9-13) for sufficient time (from 15 minutes to 1 hour), terminated enzymatic activity completely, and caused an irreversible denaturation thereof.

[0376] In order to identify the active peptides contained in the peptides derived from natural casein the lyophilized preparation was fractionated using high performance liquid chromatography (HPLC), as described hereinabove. All of the lyophilized samples analyzed demonstrated similar retention time profiles, with contents as described above.

[0377] Thus, major components of the crude peptides derived from natural casein preparation are the N-terminal fragment of αS1 casein, a peptide representing a fragment of β casein (SEQ ID No. 27), and a peptide representing a fragment of κ casein (SEQ ID No. 30). Minor components identified are a fragment of the N-terminal portion of αS1 casein, a peptide representing a further, distinct fragment of αS1 casein (SEQ ID No. 31), a peptide representing a fragment of αS2 casein (SEQ ID No. 32), and a peptide representing a further, distinct fragment of αS2 casein (SEQ ID No. 33).

[0378] Peptides derived from natural casein are non-toxic in rodents and humans: Extensive investigation of the short and long term effects of high doses of peptides derived from natural casein on mice, rats, guinea pigs and human volunteers confirmed the absence of toxicity, teratogenicity or adverse side effects of the preparation. In one series of tests, single doses representing 7,000 times the estimated effective dose of peptides derived from natural casein were administered intra muscularly to mice. Standard post-mortem pathology examination of the mice at 14 days post treatment revealed no toxic effects on internal organs or other abnormalities. Similar toxicity tests in guinea pigs revealed no abnormalities two weeks after single 20 mg intra-muscular doses of peptides derived from natural casein. In another series of experiments, high doses of peptides derived from natural casein administered to healthy mice had no effect on several hematological parameters measured two weeks later, including white blood cells (WBC), red blood cells (RBC), hemoglobin (HGB), electrolytes, glucose and others. A third series of experiments tested repeated high doses of 100 mg per kg body weight in mice and rats for two weeks, revealing no allergic, delayed cutaneous or anaphylactic responses and no pathological effects upon post-mortem examination. When peptides derived from natural casein were tested for their effect on the long-term survival of irradiated, bone marrow reconstituted BALB/c and C3H/HeJ mice, survival of the treated mice (18 of 27 BALB/c and C3H/HeJ; 66%) clearly exceeded the survival rates of the albumin-treated controls (4 of 26 BALB/c and C3H/HeJ; 15%). Standard teratogenicity tests [for details see, for example, Drug Safety in Pregnancy, Folb and Dakes, p. 336, Elsevier; Amsterdam, New York, Oxford (1990)] in mice treated with peptides derived from natural casein revealed no effect of the peptides on any developmental parameters.

[0379] Similar to its lack of toxicity or side effects when tested in rodents, peptides derived from natural casein were safe when administered to humans as well. Comparison of blood and urine samples from seven healthy human volunteers before, during and 7 days after intramuscular injection of peptides derived from natural casein revealed no changes in any of the clinical parameters. No other negative effects were observed.

[0380] Thus, high dose and extended treatment of rodents with peptides derived from natural casein revealed no apparent toxic, pathological, hypersensitivity, teratogenic, serological or any other negative effects. Moreover, peptides derived from natural casein administration to irradiated mice, at risk for short- and long-term complications, conferred a significant survival advantage over 200-300 days. These, and the absence of any undesirable effects in healthy human volunteers receiving peptides derived from natural casein via injections clearly demonstrate the peptide's safety in parenteral administration.

[0381] Reconstitution of bone marrow in transplant recipient mice: When C57B1/6 mice were lethally irradiated and reconstituted with syngeneic bone marrow from mice that were either treated a day prior to bone marrow collection with 1 mg per animal peptides derived from natural casein or not so treated, survival of irradiated mice that received bone marrow from treated mice far exceeded that of irradiated mice that received bone marrow from non treated mice (survival of irradiated mice that received bone marrow from treated mice was 15 out of 18, 10 days post irradiation; whereas survival of irradiated mice that received bone marrow cells from saline-treated control mice was 4 out of 17, 10 days post irradiation). Spleens derived from irradiated mice that received bone marrow from treated mice included about twice to three times as many colonies per spleen, as compared to spleens of irradiated mice that received bone marrow cells from saline-treated control mice (1-5 colonies as compared to 0-3 colonies).

[0382] Peptides derived from natural casein stimulate the proliferation of lymphocytes: Natural killer (NK) and cytotoxic T cells are crucial to the immune system's ability to protect against invasion by both infectious pathogens and cancer cells, by both active cytotoxicity and the secretion of immunoregulatory lymphokines. Immune compromise, such as in AIDS or following chemotherapy, results in abnormal, weakened T or NK cell activity. When normal murine bone marrow cells from BALB/c and C57B1/6 mice were cultured in the presence of 100 μg per ml peptides derived from natural casein, a clear increase in NK activity was observed in both effector:target cell ratio groups. Moreover, comparison between the two groups revealed a clear dose response relationship. At the 25:1 effector:target cell ratio the average NK activity was elevated from 13.93% to 30.77% and at the 50:1 effector:target cell ratio the average NK activity was elevated from 13.68% to 44.05% (FIG. 1). Similar experiments using human Peripheral Blood Stem Cells from Granulocyte Colony Stimulating Factor-treated donors demonstrated an even more significant, concentration-dependent stimulation of target cell lysis by peptides derived from natural casein.

[0383] In the first set of experiments (FIG. 2a), NK activity was measured in blood samples taken from one patient and incubated at two effector:target cell ratios with increasing peptides derived from natural casein concentration. Only 4% ³⁵S release was measured in the control, untreated PBSC culture. Almost the same percent radioactivity (4%) was found at the lowest peptide concentration (5 μg per ml). However, at higher peptide concentrations, in the range of 10 μg per ml up to 100 μg per ml, a release of 10.8-14.9% ³⁵S was measured for effector:target cell ratios of 100:1 and 8.3-14.5% ³⁵S for effector target cell ratios of 50:1 (FIG. 2a).

[0384] When PBS cells from normal (patient 1) and affected (patients 2-6) human donors were incubated with increasing concentrations of the peptides derived from natural casein, a significant enhancement of affected patients' NK cell activity could be measured. Thus, while the peptides derived from natural casein had a minimal effect on the normal patient's NK activity (increased from 13-15% ³⁵S release, patient 1), PBS cells from both breast cancer and Non-Hodgkins Lymphoma patients (patients 3 and 4, for example) exhibited dramatic, dose-dependent increases in NK activity (3.5 to 10.8% ³⁵S; 12.2 to 19.1% ³⁵S, respectively) (FIG. 2b).

[0385] Peptides derived from natural casein stimulate the proliferation of CD56 surface antigen positive (NK) cells: In another series of experiments Peripheral Blood Stem Cells (PBSC) from 5 human donors receiving G-CSF treatment were incubated with peptides derived from natural casein for 10, 14, or 28 days, then assayed for presence of the CD₅₆ antigen. A sometimes dramatic increase in CD₅₆ antigen detection was observed in the peptide-treated cells from all the donors but one (patient 1). A representative response is depicted in FIG. 3a: Following 10 days of incubation with or without peptides derived from natural casein, the presence of CD₅₆ surface antigen-positive (NK) cells was detected by direct immunofluorescent staining. Overall, incubation with peptides derived from natural casein increased the mean percentage of the cells positively stained for CD₅₆ from 0.64% in the control group to 2.0% following treatment (FIG. 3a).

[0386] Peptides derived from natural casein stimulate the proliferation of CD3 surface antigen-positive (T) cells: The effect of peptides derived from natural casein on the proliferation of CD₃ surface antigen-positive (T) cells in PBS cells from 5 subjects was assayed by direct immunofluorescence. In all but one patient (patient 4), 14 days incubation with peptides derived from natural casein significantly increased T-cell proliferation, up to more than 5 fold in some. Taken together, the mean percentage of the cells positively stained for CD₃ increased from 19.45% in the control group to 35.54% in the treated group (FIG. 3b).

[0387] Peptides derived from natural casein stimulate the proliferation of—CD56 and CD3 (NK/T-cells) positive cells: In an additional experiment PBSCs from 7 patients were incubated with peptides derived from natural casein for 28 days, and the effect on proliferation of NK/T cells (CD₅₆ and CD₃ surface antigen-positive) was detected by direct immunofluoresence. Incubation with peptides derived from natural casein stimulated proliferation of T-cell greater than 5 fold in some cases (patient 6), while the mean percentage of the CD₃-positive (T-) cells increased from 2.08% in the control group to 6.49% in the treated group. The number of both CD₅₆ and CD₃ surface antigen-positive (NK/T) cells was increased from 1.1% in the control to 4.3% in the treated group (FIG. 3c). Thus, peptides derived from natural casein stimulate the proliferation of both T-lymphocytes and Natural Killer cells from normal murine and human blood cell progenitors. Significantly, the greatest immune-stimulatory effect of the peptides derived from natural casein was noted in human donors having initially low T- and NK cell levels (FIG. 3a-c).

[0388] Synthetic peptides derived from casein stimulate human lymphocyte proliferation in vitro: When synthetic peptides derived from casein representing the first 3 to 26 residues of αS1 casein were incubated with human PBSCs from healthy and cancer patients (see below), a significant increase in NK cell activity was observed. Target cell lysis was greatest (from 3 to greater than 5 fold that of controls) in Non-Hodgkin's Lymphoma and Breast Cancer patient's PBSC cultures after two days incubation with as little as 10 μg per ml of peptides containing the first 9 or more residues of αS1 casein (FIG. 4). Under identical conditions, none of the peptides tested had a significant effect on NK activity in PBSC cultures from healthy human donors. Thus, even low concentrations of peptides containing the first 10 residues of the N-terminal sequence of αS1 casein are capable of selectively stimulating in vitro lymphocyte proliferation in cells from cancer patients.

[0389] Similar stimulation of NK cell activity was observed when PBS cells from human donors with hematopoietic disease were incubated with Synthetic peptides derived from casein representing the first 3 amino acid residues of αS1 casein. Incubation of the PBS cells with the peptides increased target cell lysis from 2- to greater then 8-fold that of the untreated controls. Of the 5 patients tested, three (3) responded to 25 μg/ml peptide concentration, one (1) responded to 100 μg/ml peptide concentration and one (1) to 250 μg/ml. Three out of the five (5) patients responded at 25 μg/ml. No significant effect on NK activity in PBSC cultures from healthy human donors treated with the synthetic peptide representing the first 3 amino acids of αS1 casein, was observed, confirming the selective nature of the human lymphocyte-stimulating properties of casein-derived peptides.

[0390] Stimulation of hematopoiesis in human blood cell progenitors:

[0391] Blood cell progenitors differentiate into a variety of blood cells: macrophages, monocytes, granulocytes, lymphocytes, erythrocytes and megakaryocytes. Progenitor cells are abundant in bone marrow, but are also found in peripheral blood after Granulocyte Colony Stimulating Factor treatment (PBSCs), and fresh Cord Blood. When increasing concentrations (50-600 μg per ml) of peptides derived from natural casein were added to cultures of human Bone Marrow, PBSC and Cord Blood, an increase in cell proliferation, as measured by [³H]-thymidine incorporation was noted (FIGS. 5a-5c). Human PBSC proliferation was most greatly effected by 300 μg per ml (FIG. 5a) after 15 days in culture. An even greater effect was noted for Cord Blood cells in culture (3 to 4 fold increase in [³H]-thymidine incorporation) after 14 days incubation (but not after 7 days) with peptides derived from natural casein (600 μg per ml, FIG. 5c). Cultured human bone marrow cells from three out of four donors also reacted strongly (3 to 5 fold increase in incorporation) to peptides derived from natural casein (300 μg per ml) after 21 days incubation (FIG. 5b). Thus, peptides derived from natural casein stimulate proliferation of human blood cell progenitors from bone marrow as well as other sources. Interestingly, incubation of cultured human K562 (Chronic Myeloid Leukemia) and Colon (Colon cancer) cell lines with high concentrations (up to 500 μg per ml) of peptides derived from natural casein under similar conditions had no effect on [³H]-thymidine incorporation. Thus, peptides derived from natural casein stimulate proliferation of human blood cell progenitors but not growth of cancerous cells in vitro.

[0392] Stimulation of megakaryocytopoiesis by peptides derived from casein:

[0393] Peptides derived from natural casein stimulate megakaryocyte progenitor proliferation in cultured murine bone marrow cells: Multinucleated megakaryocytes develop in the bone marrow from primitive stem cells, mature to giant cells and give rise to thousands of thrombocytes per megakaryocyte. Thrombocytes are crucial for clot formation and thrombocytopenia is a major concern in myeloablative conditions (following chemotherapy or radiotherapy).

[0394] Primary bone marrow cell cultures can be induced to form CFU-GM (Granulocyte and Monocyte) colonies, and CFU-GEMM (Granulocyte, Erythroid, Macrophage and Megakaryocyte) colonies, containing additional blood cell types. Colony counts reflect expansion of specific progenitors, cell numbers reflect proliferation rates and differential cell counts reflect which specific cell lineages have developed [Patenkin, D. et al. (1990), Mol. Cel. Biol. 10, 6046-50]. In cultured murine bone marrow cells incubated with erythropoietin and IL-3, addition of 25 μg per ml peptides derived from natural casein for 8 days increased the number of CFU-GEMM two and one half fold over controls, stimulating a three fold increase in relative cell numbers per colony in the CFU-GEMM. In a similar series of experiments, addition of peptides derived from natural casein to bone marrow cells incubated with erythropoietin and conditioned medium (see Materials and Experimental Methods) stimulated a concentration-dependent increase in the percentage of early and late megakaryocytes (15% megakaryocytes without peptides, to 50% with 500 μg per ml peptides derived from natural casein). Thus, 8 days treatment with peptides derived from natural casein stimulated a significant increase in megakaryocyte formation and development in primary murine bone marrow cultures.

[0395] In a similar series of experiments, synthetic αS1-, αS2-, β- or κ-casein, alone or in combination, stimulated proliferation of GEMM colonies in cultured primary murine bone marrow cells. The number of GEMM colonies scored in murine bone marrow cells prepared as above and exposed to 25 μg per ml synthetic peptides derived from β-(SEQ ID NO: 28) or κ-(SEQ ID NO: 30) casein, was greatly enhanced (>100%) at 8 days incubation compared with untreated (0 μg per ml) control colonies (FIG. 22). Surprisingly, the two peptides in combination exerted an even greater effect on GEMM colony formation. Exposure of the murine primary bone marrow cells to a combination of optimal concentrations of peptides derived from β-(SEQ ID NO: 28) and κ-(SEQ ID NO: 30) casein (β+κ) unexpectedly resulted in a strongly enhanced effect on GEMM proliferation (>350%, FIG. 22). Thus, peptides derived from α-, β- or κ-casein-casein are more effective in stimulating GEMM proliferation in combination than each alone.

[0396] Synthetic peptides derived from casein stimulate megakaryocyte progenitor proliferation in cultured murine bone marrow cells:

[0397] Similar to the above and under similar experimental conditions, synthetic peptides derived from casein representing the first 5 to 24 amino acids of αS1 casein increase the percentage of early and late megakaryocytes from 15% without the synthetic peptide to more than 40% with 25 μg per ml of synthetic peptides (FIG. 7). Thus, 8 days treatment with synthetic casein derived peptides representing the first 5, 6, 11, 12, 17, 18, 19, 20, 21 and 24 amino acids stimulated a significant increase in megakaryocyte formation and development in primary murine bone marrow culture. Somewhat milder, yet appreciable, stimulation was observed with the other synthetic peptides derived from αS1 casein.

[0398] In a similar experimental regimen, synthetic peptides representing amino acids 193-208 of β-casein (SEQ ID NO. 28), amino acids 106-127 of κ-casein (SEQ ID NO. 30), and amino acids 1-22 of αS1-casein (SEQ ID NO. 21) all stimulated an increase in early, late and total megakaryocyte formation and development in primary murine bone marrow cultures. An increase in total megakaryocyte proliferation of 21%, 32% and 57% over controls was observed in cells supplemented with synthetic κ-casein (SEQ ID NO. 30), β-casein (SEQ ID NO. 28), and αS1-casein (SEQ ID NO. 21), respectively (FIG. 21).

[0399] Peptides derived from natural casein stimulate Megakaryocytopoiesis in cultured human bone marrow cells: When 100 μg per ml peptides derived from natural casein were added under similar conditions to human bone marrow cell cultures from healthy donors, CFU-GM colony formation was increased with or without additional stimulating factors (GM-CSF, CM). Peptides derived from natural casein also stimulated erythroid cell forming colonies in the presence of erythropoietin. Treatment of the human bone marrow cells with thrombopoietin (TPO) stimulates megakaryocyte (MK) colony formation. Addition of 300 μg per ml peptides derived from natural casein to TPO-treated cells stimulates a more than twofold increase (16 colonies per 2×10⁵ cells without peptides, 35 colonies per 2×10⁵ with peptides derived from natural casein) in MK colony proliferation.

[0400] In the presence of additional hematopoietic factors, such as erythropoietin, human IL-3, hSCF and AB serum, 14 days incubation with peptides derived from natural casein stimulated a nearly three fold increase in CFU-GEMM colonies from human bone marrow cells (158 colonies with 500 μg per ml peptides derived from natural casein, 68 colonies with the factors alone), but had a smaller (one and one half fold) effect on cultured cord blood CFU-GEMM formation. The relative cell number counts in the cultured human bone marrow and cord blood colonies reflect megakaryocyte cell proliferation in response to addition of 25 μg per ml peptides derived from natural casein (see Table shown in FIG. 6). Thus, incubation of cultured human primary bone marrow and cord blood cells with peptides derived from natural casein stimulates the development and proliferation of both committed megakaryocyte and erythroid cell colonies. Significantly, the synergy observed between TPO and peptides derived from natural casein in stimulating megakaryocytopoiesis indicates a probable role for this potent hematopoietic growth factor in the mechanism of peptides derived from casein's stimulatory properties, and further suggests the likelihood of similar augmentation of a wide range of TPO-mediated effects by peptides derived from natural casein.

[0401] Peptides derived from natural casein and synthetic peptides derived from natural casein potentiate the effect of Erythropoietin (EPO) in cultured human bone marrow cells: The effect of natural and synthetic peptides derived from casein on erythroid cell proliferation in cultured human bone marrow cells was assessed under the same conditions outlined hereinabove for megakaryocytopoiesis. When added in the presence of EPO, 50-300 μg/ml peptides derived from natural casein, or 100 μg/ml Synthetic peptides derived from casein (F, Table 3, SEQ ID NO:18) stimulated a one and one-half (synthetic peptide) to four-fold proliferation of erythroid cell precursors (appearance of BFU-E colonies) compared to the bone marrow cells treated with EPO alone. Thus, peptides derived from natural casein and synthetic derivatives thereof act to potentiate the erythropoietic-stimulating effects of EPO, and as such can be used to augment of a wide range of clinically important EPO-mediated effects.

[0402] Synthetic peptides derived from casein stimulate Dendritic cells proliferation in murine CFU-GEMM: The effect of Synthetic peptides derived from casein on dendritic cell proliferation in murine primary bone marrow cells was assessed under the same conditions outlined for the stimulation of megakaryocytes. Synthetic peptides derived from casein representing the first: 2, 3, 5, 6, 7, 9, 11, 12, 16, 23, 24 and 26 amino acids of a S1 casein stimulated the proliferation of dendritic cells, from 2.2% and up to 23% of total cells compared with 0.1-0.2% dendritic cells in the cell samples incubated without Synthetic peptides derived from casein (FIG. 7).

[0403] Synthetic peptides derived from casein stimulate Plasma cell proliferation in murine CFU-GEMM: The effect of Synthetic peptides derived from casein on plasma cell proliferation in murine primary bone marrow cells was demonstrated under the same conditions outlined for the stimulation of megakaryocytes. Synthetic peptides derived from casein representing the first: 2, 3, 5, 7, 11, 16, 17, 18, 19, 20, 21, 22, 23 and 24 and 26 amino acids of αS1 casein, significantly stimulated the proliferation of plasma cells, from 1.5% and up 12.3% of total cell count, compared with 0.3% of total without Synthetic peptides derived from casein (FIG. 7).

[0404] Synthetic peptides derived from casein stimulate Macrophage proliferation in CFU-GEMM: The effect of Synthetic peptides derived from casein on macrophage proliferation in murine primary bone marrow cells was demonstrated under the same conditions outlined for the stimulation of megakaryocytes. Incubation of cells with synthetic peptides derived from casein representing the first: 7, 9, 16, and 23 amino acids of αS1casein significantly stimulated the proliferation of macrophages, from approximately 17% of total cell count in controls, to nearly 30% of total in cells incubated with Synthetic peptides derived from casein (FIG. 7).

[0405] Synthetic peptides derived from casein stimulate Red Blood Cells proliferation in CFU-GEMM: The effect of Synthetic peptides derived from casein on red blood cell proliferation in murine primary bone marrow cells was demonstrated under the same conditions outlined for the stimulation of megakaryocytes. Incubation of cells with Synthetic peptides derived from casein representing the first 4 amino acids from the N terminus of αS1 casein (SEQ ID NO.3) significantly stimulated the proliferation of red blood cells, from 53% of total cell count in controls, to 71% of total in cells incubated with the synthetic peptide derived from casein (FIG. 7).

[0406] Synthetic peptides derived from casein stimulate Polymorphonuclear (PMN) cell proliferation in CFU-GEMM. The effect of Synthetic peptides derived from casein on the proliferation of polymorphonuclear (PMN) cells in murine primary bone marrow cells was demonstrated under the same conditions outlined for the stimulation of megakaryocytes. Incubation of cells with Synthetic peptides derived from casein representing the first: 3, 6, 7, 9, 16 and more, up to and including 26 amino acids of αS1 casein significantly stimulated the proliferation of PMNs, from 1.6% of total cell count in unincubated controls, to between 2.9% and 14.9% of total in cells incubated with Synthetic peptides derived from casein (FIG. 7).

[0407] Synthetic peptides derived from α-, β- or κ-casein stimulate Granulopoietic (GM) cell proliferation in CFU-GM: As mentioned hereinabove, formation and expansion of CFU-GM (Granulocyte and Monocyte) colonies, and CFU-GEMM (Granulocyte, Erythroid, Macrophage and Megakaryocyte) colonies constitute one of the early events in the differentiation of hematopoietic progenitor cells in the bone marrow. The effect of synthetic peptides derived from α-, β- or κ-casein on the proliferation of granulocytes and macrophages in murine primary bone marrow cells was demonstrated under the same conditions outlined for the stimulation of megakaryocytes, with the addition of cytokine IL-3 and granulocyte cell stimulating factor (G-CSF). Incubation of murine bone marrow progenitor cells with synthetic peptides derived from α-, β- or κ-casein representing amino acids 1-22 (J, SEQ ID No. 21) and 1-6 (30-4, SEQ ID No. 5), alone or in combination (FIG. 19) significantly stimulated the proliferation of granulocytes, when added along with G-CSF (18% and 25% increase for “30-4” and “J”, respectively, in the presence of G-CSF)(FIG. 19).

[0408] A similar effect of synthetic peptides derived from α-, β- or κ-casein was observed on the proliferation of granulocytes and macrophages from human bone marrow progenitor cells. Surprisingly, administration of synthetic peptides derived from α-casein (“J”, SEQ ID NO:21) or β-casein (SEQ ID NO: 28) enhanced the granulopoietic stimulating effects of G-CSF by >50% (100 μg “J”) and 30% (300 μg “β”), respectively. (FIG. 20). Thus, synthetic peptides derived from αS1-, αS2-, β- or κ-casein or combinations thereof are effective in augmenting the effect of granulopoietic factors such as G-CSF on bone marrow hematopoietic progenitor cell differentiation and expansion.

[0409] Peptides derived from natural casein stimulate hematopoiesis in vivo following irradiation and bone marrow transplant: Myeloablative therapy may lead to life-threatening reduction in thrombocytes and leukocytes, which may persist despite administration of blood cells and growth factors. The following demonstrates the effect of peptides derived from natural casein following irradiation and bone marrow transplantation.

[0410] Peptides derived from natural casein enhance leukocyte and platelet reconstitution following syngeneic bone marrow transplantation in mice: When sub-lethally irradiated (600 cGy), minimally bone marrow-reconstituted, BALB/c mice (n=12) received 1 mg per mouse peptides derived from natural casein via intravenous injection one day after bone marrow cell reconstitution, significant increases in peripheral white blood cell counts on days 4, 6 and 15 post-treatment were noted, compared to controls receiving human serum albumin (FIG. 8). Platelet counts in the peripheral blood of both the treated and control irradiated, bone marrow transplanted mice were equally depressed up to 8 days post treatment. However, by the thirteenth day a clear advantage was noted for the mice treated with the peptides derived from natural casein, demonstrating a significant increase over the human serum albumin-treated controls which became even more pronounced by day 15 (FIG. 9). Thus, peptides derived from natural casein enhance platelet and leukocyte reconstitution following transplantation with limiting numbers of bone marrow cells. It is expected that this effect will be further increased in reconstitution with optimal, rather than limiting numbers of bone marrow cells.

[0411] Further, in another series of similar experiments, it was observed that a partially purified (diafiltration with a 1 kDa cutoff membrane) preparation of peptides derived from natural casein, comprising peptides derived from natural αS1- and β-casein, significantly enhanced platelet reconstitution (by approx 25% over controls) in irradiated, bone marrow transplanted mice.

[0412] Synthetic peptides derived from casein enhance leukocyte reconstitution following syngeneic bone marrow transplantation in mice: When sub-lethally irradiated (600 cGy), minimally bone marrow-reconstituted, BALB/c mice (n=5 per synthetic peptide, n=10 in the control group) received 1 mg per mouse synthetic peptides (13-26 amino acids in length, see Table 3) derived from casein via an intraperitoneal injection one day after bone marrow transplantation, a clear enhancement of leukocyte reconstitution was observed. Significant increases in peripheral white blood cell counts over a 10 to 14 day period were noted with peptides having 15 (day 10: 1.72×10⁶ cells per ml; day 12: 6.54×10⁶ cells per ml) and 22 (day 10: 2.74 cells×10⁶ per ml; day 12: 5.20×10⁶ cells per ml) amino acids (see Table 3), compared to controls receiving human serum albumin (day 10: 1.67×10⁶ cells per ml; day 12: 4.64×10⁶ cells per ml). Thus, synthetic peptides derived from casein enhance leukocyte reconstitution following transplantation with limiting numbers of bone marrow cells.

[0413] In a series of similar experiments, F1 mice (n=5 mice per group) which had been sub-lethally irradiated (750 cGy) and bone-marrow-reconstituted, as described above, received intravenous administration of 1 mg of synthetic peptides derived from αS1- (SEQ ID NO. 21), β- (SEQ ID NOs. 28), or κ-casein (SEQ ID. NO: 434), alone or in combination, or peptides derived from natural αS1- or κ-casein, one day following reconstitution. Peripheral white blood cell counts (FIG. 24) clearly demonstrate the strong stimulation of early leukocyte reconstitution (5 and 7 days post-transplantation) with both peptides derived from natural αS1- and κ-casein, and synthetic peptides derived from αS1-, β-, or κ-casein.

[0414] While reducing the present invention to practice, it was uncovered that a combination of peptides derived from α-, β- or κ-casein is significantly more effective than the same amount of individual peptides. Mice treated with a combination of optimal doses of synthetic peptides derived from αS1-(SEQ ID No. 21) and β-casein (SEQ ID No. 28) stimulated leukocyte reconstitution to a significantly greater degree than the individual component synthetic peptides derived from αS1- or β-casein alone (FIG. 25).

[0415] Synthetic peptides derived from casein enhance platelet reconstitution following syngeneic bone marrow transplantation in mice: In order to confirm the observed ability of synthetic peptides derived from casein to enhance megakaryocyte proliferation in hematopoietic stem cell cultures (see FIGS. 6 and 7), the peptides' effects on platelet reconstitution in vivo was investigated. When lethally irradiated (800 cGy), minimally bone marrow-reconstituted, mice (n=5 per group) received 100 μg per mouse synthetic peptides 4P and 3a (6 and 12 amino acids in length, respectively—see Table 3) in 4 daily intraperitoneal injections (4-7 days post-transplantation), a clear enhancement of platelet reconstitution over untreated controls was observed. Significant increases in platelet counts at 10 and 12 days post transplantation were noted for both peptides. Treatment with peptide 4P increased counts by 29% (872×10³/ml compared with 676×10³/ml in the control group) at 12 days post transplantation while treatment with peptide 3a increased counts by up to 35.5% (229×10³/ml compared with 169×/ml in the control group) at 10 days, and up to 13.5% (622×10³/ml compared with 461×10³/ml in the control group) at 12 days post transplantation. Thus, the same synthetic peptides derived from casein enhance megakaryocyte proliferation in vitro and platelet reconstitution following bone marrow transplantation in vivo.

[0416] In an additional series of similar experiments, F1 mice sub-lethally irradiated (750 cGy) and minimally-bone marrow reconstituted (3×10⁶ cells) which received intravenous administration of 1 mg of synthetic peptides derived from casein demonstrated a significant increase in platelet counts. Mice receiving a synthetic peptide representing amino acids 193-208 of β-casein (SEQ ID NOs. 28), and the synthetic peptide representing amino acids 106-127 of κ-casein (SEQ ID NO. 30) had enhanced platelet counts of 32% and 26% greater, respectively, compared to those of untreated control mice at 10 days post-transplantation. Bone marrow recipient mice, treated with synthetic peptide representing amino acids 1-22 of αS1-casein (SEQ ID NO. 21) (“J”), showed similar enhancement of platelet reconstitution at 10 days post-transplantation (FIG. 23).

[0417] Peptides derived from natural casein inhibit in vitro infection of lymphocytic T cell lines by HIV-1 virus

[0418] Penetration of peptides derived from natural casein into lymphocytic Tcells: In order to investigate the mechanisms of immune stimulatory and anti-viral effects of peptides derived from natural casein, susceptible Sup-T1 and CEM cultured human T-cells were treated with peptides derived from natural casein prior to in vitro infection with HIV-1 virus. Fluorescent microscopy revealed that FITC-conjugated peptides derived from natural casein (100 μg per ml) penetrated the Sup-T1 cells when incubated therewith as described above (FIGS. 10a-f). A small amount of label was observed in the cytoplasm of the cells after 15 minutes (FIGS. 10a-b). At 30 minutes (FIGS. 10c-d) more label was observed in the cytoplasm, with limited nuclear uptake. From 1-hour incubation and on (FIGS. 10e-f), FITC-labeled peptides derived from natural casein were observed in the cytoplasm, but mostly they were concentrated in the cell nucleus. Analysis of the Sup-T1 cells by flow cytometry confirmed increasing uptake of the labeled peptides derived from natural casein from 5 minutes post incubation.

[0419] Peptides derived from natural casein enhance human lymphocyte proliferation: The presence of peptides derived from natural casein in the culture medium resulted in increased Sup-T1 cell counts over a period of 14 days. The greatest increases in cell number at 7 days was observed for 50 μg per ml peptides derived from natural casein (42%), for 1000 μg at 10 days (30%) and for 600 μg (32%) at 14 days incubation (data not shown). Measurement of [³H]-thymidine incorporation by the cultured cells, providing a proliferation index, reflected the increase in cell number, with the most significant effect noted for 600 μg per ml peptides derived from natural casein on day 10 and 50 μg per ml on day 14 (FIG. 11). The reduced proliferation indices at 14 days probably reflect cell overgrowth and nutrient depletion.

[0420] Synthetic peptides derived from casein enhance human lymphocyte proliferation: The presence of synthetic peptides derived from casein (all peptides listed in Table 3) in the culture medium resulted in increased Sup-T1 cell counts over a period of 10 days. The increase was similar for all synthetic peptides. The greatest increases in lymphocyte cell number in infected cells were observed for 250 μg and 500 μg per ml of peptide representing the first 9 amino acids (80% and 33%, respectively) (data not shown).

[0421] Peptides derived from natural casein inhibit HIV-1 infection in human lymphocyte cells: Susceptible CEM lymphocyte cells pretreated with peptides derived from natural casein (50-1000 μg per ml) 24 or 48 hours prior to incubation with HIV-1, or exposed to HIV-1 pretreated 3 hours with peptides from natural casein, exhibited enhanced cell proliferation and reduced levels of viral infection compared to untreated controls. Cell counts and HIV-1 P²⁴ antigen assay at 15 days post infection revealed 100% inhibition of viral infection after 3 hours incubation of viruses with 600-1000 μg per ml peptides derived from natural casein and 98% and 99% inhibition after 24 hours incubation of cells with 50 and 600 μg per ml peptides, respectively (comparing cell numbers with uninfected controls UIF). Longer incubation times were not found to be more effective (FIG. 12). Although increasing concentrations of peptides derived from natural casein enhanced cell proliferation at 3 and 24 hours post infection, viral infection is most significantly inhibited in these fastest growing cultures. An even more dramatic enhancement of cell proliferation and inhibition of HIV-1 infection was observed in Sup-T1 cells pretreated with peptides derived from natural casein before HIV-1 infection (average inhibition of viral infection of 96.7%, 88.7% and 95.7% for 3 hours pretreatment of virus, and 24 hours and 48 hours pretreatment of cells, respectively) (not shown). Thus, peptides derived from natural casein penetrate human cultured lymphocyte cells and their nuclei, enhance cell growth, and significantly reduce the susceptibility of CD4 cells to HIV-1 infection. As such, peptides derived from natural casein are expected to be useful both at preventing HIV infection and for post infection treatment of HIV infected and AIDS patients.

[0422] Synthetic peptides derived from casein inhibit HIV-1 infection in human lymphocyte cells: The ability of synthetic peptides derived from casein to inhibit HIV-1 infection in human lymphocyte cells was demonstrated using CEM-lymphocyte cells under the same conditions outlined above. Susceptible CEM lymphocyte cells pretreated with synthetic peptides derived from αS1-casein (50-1000 μg per ml) 24 or 48 hours prior to incubation with HIV-1, or exposed to HIV-1 pretreated 3 hours with synthetic peptides from αS1-casein, exhibited enhanced cell proliferation and reduced levels of viral infection compared to untreated controls, 24 or 48 hours incubation with synthetic peptides representing the first 3 amino acids of αS1 casein conferred a significant degree of resistance to infection following incubation with HIV-1. Lymphocyte cell numbers were 1.29×10⁶ (100 μg per ml) and 2.01×10⁶ (500 μg per ml) in the treated cells as compared to the infected HIV-1 control of 1.06×10⁶ (FIG. 13). HIV-1 infection levels in the same cells, measured by the HIV-P²⁴ antigen assay at 7 days post infection, was significantly reduced in the peptide treated cells (0.17 and 0.14 ng P²⁴ Antigen/ml with 100 μg/ml and 500 μg/ml respectively), as compared to the untreated controls (0.52 ng P²⁴ Ag/ml).

[0423] Likewise, significant inhibition of HIV-1 infection was observed in the CEM cells exposed to viruses that had been pre-treated (3 hours) with the synthetic casein derived peptide representing the first 5 amino acids of a S1casein.

[0424] Cell counts in the cultures incubated with 10 and 25 μg peptide 3P per ml were 1.17×10⁶ and 1.26×10⁶ respectively, as compared to the infected HIV-1 control of 1.06×10⁶.

[0425] HIV-P²⁴ antigen assay at 7 days post infection, revealed significant reduction in HIV-1 infection levels in treated cultures (0.26 and 0.18 ng P²⁴ Ag per ml for 10 and 25 μg per ml respectively, as compared to the control of 0.52 ng P²⁴ Ag per ml).

[0426] Likewise, 3 hours preincubation of the virus with the synthetic peptide derived from casein 4P, representing the first 6 amino acids of αS1 casein had a significant effect on the susceptibility of CEM lymphocyte cells to infection with HIV-1.

[0427] Cell numbers were most affected at concentrations of 25 and 250 μg per ml (1.26×10⁶, and 1.59×10⁶ respectively, as compared to the infected control value of 1.06×10⁶).

[0428] Assay of HIV-P²⁴ antigen at 7 days post infection, revealed a dose dependent reduction in viral particles as compared to the untreated, infected control cultures (FIG. 13). Thus, the protection from HIV-1 infection afforded lymphocyte cells by the peptides derived from natural casein is retained in synthetic peptides derived from casein representing as few as the first five N-terminal amino acids of αS-1 casein.

[0429] Peptides derived from natural casein prevent development of glucosuria in Non-Obese Diabetic (NOD) mice: Non-Obese Diabetic (NOD) mice spontaneously develop Juvenile (Type I, IDDM) Diabetes, an autoimmune condition causing inflammation of the pancreatic β cells and ending in disease and death. Female NOD mice are extremely susceptible, demonstrating evidence of macrophage invasion of the pancreatic islet interstitial matrix as early as 5 weeks old. A once or twice weekly injection of 100 μg peptides derived from natural casein for 5 weeks (5 or 10 injections total) were completely effective in preventing the glucosuria associated with the onset and course of the disease. By 200 days 100% of the untreated control mice (n=5) had become diabetic, and subsequently died, while the treated mice (n=10) remained 100% euglycemic, all still surviving at 365 days (FIG. 14). Thus, peptides derived from natural casein effectively protected genetically susceptible mice against the onset of this autoimmune inflammatory condition.

[0430] Synthetic peptides derived from casein prevent development of glucosuria in Non-Obese Diabetic (NOD) mice:

[0431] The preventative effect of synthetic peptides derived from casein on the development of glucosuria in NOD mice was demonstrated under the same conditions outlined above, except that the mice were injected only twice weekly for five (5) weeks with 100 μg of synthetic peptides derived from casein. The results of these experiments are presented in Table 4 below:

TABLE 4
The effect of synthetic peptides on IDDM in NOD mice

| | | | IPGT TEST | |
|---|---|---|---|---|
| Peptide | Healthy/ | Urine | 0 min. | 60 min. |
| Derivative code | Total* | Sugar | (pre-load) | post load |
| Y(SEQ ID NO: 7) | 1/5 | Negative | 121 | 138 |
| X(SEQ ID NO: 8) | 3/5 | Negative | 94 | 114 |
| | | Negative | 104 | 119 |
| | | Negative | 141 | 114 |
| 1a(SEQ ID NO: 9) | 1/5 | Negative | 88 | 106 |
| 2a(SEQ ID NO: 10) | 4/5 | Negative | 215 | 183 |
| | | Negative | 112 | 119 |
| | | Negative | 95 | 107 |
| | | Negative | 159 | 204 |
| 3a(SEQ ID NO: 11) | 3/5 | Negative | 135 | 137 |
| | | Negative | 205 | 197 |
| | | Negative | 201 | 211 |
| A(SEQ ID NO: 12) | 2/5 | Negative | 134 | 164 |
| | | Negative | 105 | 107 |
| B(SEQ ID NO: 13) | 2/5 | Negative | 130 | 117 |
| | | Negative | 130 | 97 |
| D(SEQ ID NO: 15) | 2/5 | Negative | 99 | 108 |
| | | Negative | 130 | 136 |
| I(SEQ ID NO: 20) | 2/5 | Negative | 324 | not tested |
| | | Negative | 124 | 138 |
| J(SEQ ID NO: 21) | 3/5 | Negative | 166 | not tested |
| | | Negative | 193 | not tested |
| | | Negative | 186 | not tested |
| K(SEQ ID NO: 22) | 2/5 | Negative | 116 | 143 |
| | | Negative | 443 | not tested |
| Chay-13 | 2/5 | Negative | 123 | 130 |
| | | Negative | 111 | 111 |
| Chay-13 | 2/5 | Negative | 128 | 116 |
| | | Negative | 113 | 125 |
| Control | 0/5 | | | |

Blood was drawn from the paraorbital plexus at 0 min and 60 min after the intraperitoneal injection of glucose 1 g/kg body weight. Plasma glucose levels were determined with a Glucose Analyzer 2 (Beckman Instruments, Fullerton, CA) and expressed as mmol/L.
*Healthy and well = Sugar not detected in urine.
Glucosuria = >1000 mg/dL.
IPGTT performed with 6 healthy female control mice: 0 min- 110 mmol/L; 60 min - 106 mmol/L blood glucose.

[0432] The synthetic peptides derived from casein representing the first 9 (X) (SEQ ID NO. 8), 11 (2a) (SEQ ID NO. 10) and 12 (3a) (SEQ ID NO. 11) amino acids and higher chain length of αS1 casein, were highly effective in preventing the glucosuria associated with the onset and course of the disease.

[0433] Effect of treatment with synthetic peptides derived from casein was evaluated after 25 weeks. At that time, all 5 mice in the untreated control group (n=5) had become diabetic, as indicated by the presence of frank (>1000 mg/dl) glucosuria (Table 4).

[0434] No glucosuria was detected in three of the five (3/5) NOD mice treated with the synthetic peptide representing the first nine (9) amino acids from the N terminal of αS1 casein. Of the group injected with the synthetic peptide of eleven (11) amino acids from the N terminal of αS1 casein, no glucosuria was detected in four out of five (4/5) of the NOD mice

[0435] In the groups of peptide treated mice in which glucosuria was detected, the onset was generally significantly delayed (by 3-5 weeks) relative to the onset of glucosuria in untreated controls (data not shown), indicating a clearly protective effect of the peptides even when incomplete.

[0436] The protective effects of shorter synthetic peptides derived from casein have also been studied in NOD mice. In an additional series of experiments similar to the abovementioned, administration of peptides representing the first 3 (1P) and 4 (2P) N-terminal amino acids of αS1 casein effectively prevented the onset of glucosuria in the treated mice (assayed at week 16), while the untreated controls had all become diabetic (100% glucosuria) (data not shown).

[0437] The glucose tolerance (IPGT) test performed after 25 weeks with the healthy and well NOD mice, of the group injected with the synthetic casein derived peptide of the first 9 amino acids (SEQ ID NO. 8), showed no evidence of abnormal glucose metabolism (normal glycemic values pre- and 60 minutes post-glucose loading).

[0438] In the group treated with the synthetic peptide derived from casein representing the first 11 amino acids of the N-terminal of αS1 casein (2a) (SEQ ID NO. 10), resting plasma glucose levels were somewhat elevated in two of the five mice (215 and 159 mmol/L), and remained mildly elevated at (183 and 204 mmol/L) 60 minutes post load, indicating mild diabetic tendencies. The other two mice remained within normal glycemic range throughout the test (Table 4).

[0439] In another set of experiments, under the substantially the same conditions, mice received three injections of 1 mg each, 3 days apart, of the synthetic peptide derived from casein representing the first 15 amino acids of the N-terminal of αS1 casein (C) (SEQ ID NO. 14) or the first 19 amino acids of the N-terminal of αS1 casein (G) (SEQ ID NO. 18), or PBS control. In the mice treated with peptide C (SEQ ID NO. 14), at 25 weeks, no glucosuria was detected in 3 out of 5 mice, and in response to a glucose load (IPTG test), blood glucose values were normal (<120; 101, 113, 102). In the group treated with peptide G (SEQ ID NO. 18) no glucosuria was detected in two out of 5 mice, and in response to a glucose load (IPTG), blood values stayed below 120._In general, the normal results of the IPGTT reflected the absence of glucosuria in the healthy, surviving peptide-treated mice (Table 4). Thus, synthetic peptides representing only a few amino acids from the N-terminal of αS1 casein, as well as peptides derived from native casein dramatically reduce the susceptibility of genetically predisposed NOD mice to onset of autoimmune diabetic disease.

[0440] Synthetic casein-derived peptides significantly reduce Total Cholestrol blood levels (TC), Low Density Lipoprotein (LDL) and High Density Lipoprotein (HDL): Intraperitoneal administration of Synthetic peptides derived from casein caused a significant reduction in the blood lipid (HDL, LDL and TC) values in experimentally hypercholesterolemic mice. After one week of the atherogenic Thomas Hartroft diet, the blood cholesterol levels of the mice had risen to the levels of 318 mg/dl.

[0441] One week post treatment with 1 mg synthetic peptides derived from casein per mouse, the group treated with the Synthetic peptides derived from casein representing the first 5 (3P) (SEQ ID NO. 4) and 11 (2a) (SEQ ID NO. 10) amino acids of αS1 casein, had significantly reduced TC, HDL and LDL values, compared to those of the control group [TC: 308 and 279 mg/dl respectively; HDL: 42.5 mg/dl and 41 mg/dl respectively and LDL: 247 mg/dl and 221 mg/dl respectively as compared to 393 mg/dl (TC), 54.5 mg/dl (HDL) and 326 mg/dl (LDL) in the diet-induced hypercholesterol-/hyperlipidemic control group] (FIG. 15). Thus, synthetic peptides representing the first few N-terminal amino acids of αS1 casein effectively reduced experimentally induced hyperlipidemia and hypercholesterolemia within 1 week after a single, intraperitoneal administration.

[0442] Clinical trials with peptides derived from natural casein:

[0443] Patients received a series of one, two or three intramuscular injections of 50 mg peptides derived from natural casein each, divided into three depots each treatment, as indicated.

[0444] Peptides derived from natural casein stimulates hematopoiesis in cancer patients: The hematology profiles of six cancer patients who had received or were receiving chemotherapy were examined before and following administration of peptides derived from natural casein, as indicated. Special attention was paid to changes in the Platelet (PLT), Leukocyte (WBC), Erythrocyte (RBC) and Hemoglobin (HGB) values, representing thrombocytopoiesis, leukocytopoiesis, and erythrocytopoiesis, respectively.

[0445] G.T., (Female patient, Patient 1): Patient had ovarian cancer, undergone a hysterectomy followed by chemotherapy. She received two intramuscular injections of peptides derived from natural casein at two and then two and one half months post operation. No chemotherapy was administered between the first and second administrations of peptides derived from natural casein. Blood tests from 6 days post first injection, 7, and 13 days post second injection reflect a considerable increase in platelet and WBC components, as well as increased RBC (FIG. 16).

[0446] E.C., (Female patient, Patient 2): Patient underwent a radical mastectomy for lobular carcinoma in 1983, and six years later suffered from gastric metastases. Three days prior to commencement of chemotherapy, she received one intramuscular injection (in three depots) of peptides derived from natural casein by injection, and a second 10 days after the chemotherapy. Although the blood counts from 10 and 16 days post chemotherapy indicated an attenuation of the depressed hematological profile usually encountered following chemotherapy, the most significant effects of peptides derived from natural casein were noted 3 days after the first injection, prior to the chemotherapy (FIG. 16).

[0447] E.S., (Female patient, Patient 3): Patient was suffering from widespread metastatic dissemination of a breast carcinoma first discovered in 1987. Two years later, she received a first intramuscular injection of peptides derived from natural casein, and a second 23 days later. No additional therapy was administered during this period. Blood tests indicate a strong enhancement of PLT seven days after the first treatment and a significant increase in RBC and WBC seven days after the second treatment (FIG. 16).

[0448] J.R., (Female patient, Patient 4): Patient's diagnosis is breast cancer with bone metastases. She received one intramuscular injection of peptides derived from natural casein 8 days before commencing chemotherapy, and another, 14 days later. The most significant effect is clearly seen in the rapid return of WBC levels following chemotherapy-induced depression (FIG. 16).

[0449] D.M., (Female patient, Patient 5): Patient suffering from hepatic cancer with widespread metastatic dissemination. She received three intramuscular injections of peptides derived from natural casein at 10, 8 and 6 days before receiving chemotherapy. A second series of injections was initiated 10, 12 and 14 days following the chemotherapy treatment. Although a significant effect on the hematological profile is noted following the first series of injections and prior to the chemotherapy, the most dramatic improvements are seen in the rapid return of depressed post-chemotherapy values to normalized cell counts following the second series of peptides derived from natural casein injections (FIG. 16).

[0450] Thus, administration of peptides derived from natural casein to cancer patients results in improved hematological profiles, specifically enhanced erythropoiesis, leukocytopoiesis and thrombocytopoiesis, and is capable of moderating and shortening the duration of chemotherapy-induced depression of blood components.

[0451] Peptides derived from natural casein stimulates thrombocytopoiesis in transplant recipients with resistant thrombocytopenia: Prolonged transfusion-resistant thrombocytopenia with episodes of severe bleeding, may be a life threatening complication of bone marrow transplantation, especially where traditional therapies are ineffective. Two patients with severe resistant thrombocytopenia were treated with peptides derived from natural casein.

[0452] M-1 (Female patient): 32 year old patient suffering from Acute Myeloid Leukemia in complete remission, following autologous stem cell transplantation. She had experienced two life-threatening bleeding episodes, involving pulmonary hemorrhage and a large obstructive hematoma in the soft palate. At more than 114 days post transplantation, platelet counts were refractive to rhIL-3, rhIL-6, intravenous gamma globulin, and recombinant erythropoietin. Following two intra muscular treatments of 50 mg peptides derived from natural casein (each treatment divided into three depots), her condition improved immediately. Along with the rapid return of normal platelet counts (FIG. 17), her distal limb bleeding with exertion and patechyae subsided, she was able to resume walking, and returned to her home overseas with no complications or side effects.

[0453] M-2 (Male patient): 30 year old patient suffering from Acute Myeloid Leukemia in a second complete remission following autologous stem cell transplantation, exhibiting totally resistant platelet counts and massive gastrointestinal bleeding episodes. He required daily transfusions of packed cells, had developed hypoalbuminia, and failed to respond to extensive therapy with rhIL-3, rhIL-6 and gamma globulin. Following two intramuscular treatments, each of 50 mg peptides derived from natural casein in three depots 86 days post transplantation, rapid platelet reconstitution (FIG. 18) and gradual discontinuation of the bleeding was observed. No further treatment was required, and the patient is presently completely asymptomatic with normal platelet count.

[0454] Thus, one course of two intramuscular injections of peptides derived from natural casein at 0.7-1.0 mg per kg body weight, each divided into three depots, was effective in rapidly reconstituting platelet counts and diminishing associated clinical symptoms in patients suffering from prolonged, transfusion resistant thrombocytopenia with life-threatening bleeding episodes.

[0455] Peptides derived from natural casein decreases triglycerides and Total Cholesterol in familial hyperlipidemia:

[0456] M.S. (Female patient): Patient is a 38 year old female with family history of hyperlipidemia. Before treatment with peptides derived from natural casein, blood chemistry profile revealed elevated total cholesterol (321 mg per dl), triglycerides (213 mg per dl; normal range 45-185 mg per dl) and elevated LDL-cholesterol (236.4 mg per dl; normal range 75-174 mg per dl). One month after a single administration of 50 mg peptides derived from natural casein (in three intra muscular depots) the hyperlipidemia was stabilized: total cholesterol was reduced to 270 mg per dl, triglycerides were 165 mg per dl and LDL-cholesterol was 201 mg per dl, still higher than normal range but significantly reduced from the pretreatment value. No additional treatment was administered. Thus, treatment with peptides derived from natural casein is effective in rapidly bringing about a significant reduction in otherwise untreated hyperlipidemia in humans.

[0457] Peptides derived from natural casein stimulate normoglobinemia in a case of occult bleeding:

[0458] D. G. (Male patient): Patient is a 75 year old male suffering from anemia and hypoglobinemia (depressed RBC, HGB, HCT, MCH and MCHC) associated with extensive occult bleeding. One month after receiving one intramuscular injection of 50 mg peptides derived from natural casein (in three depots), a significant reduction of the anemia was observed. After two months, RBC approached normal values (4.32 instead of 3.44 M per μl), HGB increased (11.3 instead of 8.9 g per dl) and HCT, MCH and MCHC all improved to nearly normal values, despite the persistence of occult bleeding. Thus, one injection of peptides derived from natural casein seemed capable of stimulating erythropoiesis and reducing anemia associated with blood loss in humans.

[0459] It is appreciated that certain features of the invention, which are, for clarity, described in the context of separate embodiments, may also be provided in combination in a single embodiment. Conversely, various features of the invention, which are, for brevity, described in the context of a single embodiment, may also be provided separately or in any suitable subcombination.

[0460] Although the invention has been described in conjunction with specific embodiments thereof, it is evident that many alternatives, modifications and variations will be apparent to those skilled in the art. Accordingly, it is intended to embrace all such alternatives, modifications and variations that fall within the spirit and broad scope of the appended claims. All publications, patents, patent applications and sequences identified by an accession number, mentioned in this specification are herein incorporated in their entirety by reference into the specification, to the same extent as if each individual publication, patent, patent application or sequence was specifically and individually indicated to be incorporated herein by reference. In addition, citation or identification of any reference in this application shall not be construed as an admission that such reference is available as prior art to the present invention.

### INCORPORATION-BY-REFERENCE

CD-ROM Content:

[0461] The following CD-ROM is attached herewith: Information is provided as: File name/byte size/date of creation/operating system/machine format.

[0462] 1. SEQUENCE LISTING/1.04 Mbytes/Jan. 12, 2005/MS-WINDOWS XP/PC.

The application's sequence listing, which the Patent Office published only in electronic form, follows.

SEQUENCE LISTING (4000 sequences)

SEQ ID NO: 1 - protein, 2 aa, Artificial sequence
  Synthetic peptide
RP

SEQ ID NO: 2 - protein, 3 aa, Artificial sequence
  Synthetic peptide
RPK

SEQ ID NO: 3 - protein, 4 aa, Artificial sequence
  Synthetic peptide
RPKH

SEQ ID NO: 4 - protein, 5 aa, Artificial sequence
  Synthetic peptide
RPKHP

SEQ ID NO: 5 - protein, 6 aa, Artificial sequence
  Synthetic peptide
RPKHPI

SEQ ID NO: 6 - protein, 7 aa, Artificial sequence
  Synthetic peptide
RPKHPIK

SEQ ID NO: 7 - protein, 8 aa, Artificial sequence
  Synthetic peptide
RPKHPIKH

SEQ ID NO: 8 - protein, 9 aa, Artificial sequence
  Synthetic peptide
RPKHPIKHQ

SEQ ID NO: 9 - protein, 10 aa, Artificial sequence
  Synthetic peptide
RPKHPIKHQG

SEQ ID NO: 10 - protein, 11 aa, Artificial sequence
  Synthetic peptide
RPKHPIKHQGL

SEQ ID NO: 11 - protein, 12 aa, Artificial sequence
  Synthetic peptide
RPKHPIKHQGLP

SEQ ID NO: 12 - protein, 13 aa, Artificial sequence
  Synthetic peptide
RPKHPIKHQGLPQ

SEQ ID NO: 13 - protein, 14 aa, Artificial sequence
  Synthetic peptide
RPKHPIKHQGLPQE

SEQ ID NO: 14 - protein, 15 aa, Artificial sequence
  Synthetic peptide
RPKHPIKHQGLPQEV

SEQ ID NO: 15 - protein, 16 aa, Artificial sequence
  Synthetic peptide
RPKHPIKHQGLPQEVL

SEQ ID NO: 16 - protein, 17 aa, Artificial sequence
  Synthetic peptide
RPKHPIKHQGLPQEVLN

SEQ ID NO: 17 - protein, 18 aa, Artificial sequence
  Synthetic peptide
RPKHPIKHQGLPQEVLNE

SEQ ID NO: 18 - protein, 19 aa, Artificial sequence
  Synthetic peptide
RPKHPIKHQGLPQEVLNEN

SEQ ID NO: 19 - protein, 20 aa, Artificial sequence
  Synthetic peptide
RPKHPIKHQGLPQEVLNENL

SEQ ID NO: 20 - protein, 21 aa, Artificial sequence
  Synthetic peptide
RPKHPIKHQGLPQEVLNENLL

SEQ ID NO: 21 - protein, 22 aa, Artificial sequence
  Synthetic peptide
RPKHPIKHQGLPQEVLNENLLR

SEQ ID NO: 22 - protein, 23 aa, Artificial sequence
  Synthetic peptide
RPKHPIKHQGLPQEVLNENLLRF

SEQ ID NO: 23 - protein, 24 aa, Artificial sequence
  Synthetic peptide
RPKHPIKHQGLPQEVLNENLLRFF

SEQ ID NO: 24 - protein, 25 aa, Artificial sequence
  Synthetic peptide
RPKHPIKHQGLPQEVLNENLLRFFV

SEQ ID NO: 25 - protein, 26 aa, Artificial sequence
  Synthetic peptide
RPKHPIKHQGLPQEVLNENLLRFFVA

SEQ ID NO: 26 - protein, 200 aa, Bos taurus
ARPKHPIKHQGLPQEVLNENLLRFFVAPFPEVFGKEKVNELSKDIGSESTEDQAMEDIKQMEAESISSSEEIVPNSVEQKHIQKEDVPSERYLGYLEQLLRLKKYKVPQLEIVPNSAEERLHSMKEGIHAQQKEPMIGVNQELAYFYPELFRQFYQLDAYPSGAWYYVPLGTQYTDAPSFSDIPNPIGSENSEKTTMPLW

SEQ ID NO: 27 - protein, 17 aa, Artificial sequence
  Synthetic peptide
YQEPVLGPVRGPFPIIV

SEQ ID NO: 28 - protein, 16 aa, Artificial sequence
  Synthetic peptide
YQEPVLGPVRGPFPII

SEQ ID NO: 29 - protein, 64 aa, Artificial sequence
  Synthetic peptide
MAIPPKKNQDKTEIPTINTIASGEPTSTPTTEAVESTVATLEDSPEVIESPPEINTVQVTSTAV

SEQ ID NO: 30 - protein, 22 aa, Artificial sequence
  Synthetic peptide
MAIPPKKNQDKTEIPTINTIAS

SEQ ID NO: 31 - protein, 35 aa, Artificial sequence
  Synthetic peptide
YYVPLGTQYTDAPSFSDIPNPIGSENSEKTTMPLW

SEQ ID NO: 32 - protein, 26 aa, Artificial sequence
  Synthetic peptide
TVYQHQKAMKPWIQPKTKVIPYVRYL

SEQ ID NO: 33 - protein, 19 aa, Artificial sequence
  Synthetic peptide
AMKPWIQPKTKVIPYVRYL

SEQ ID NO: 34 - protein, 4 aa, Artificial sequence
  Synthetic peptide
RPYQ

SEQ ID NO: 35 - protein, 5 aa, Artificial sequence
  Synthetic peptide
RPYQE

SEQ ID NO: 36 - protein, 5 aa, ARTIFICIAL SEQUENCE
  Synthetic peptide
RPKYQ

SEQ ID NO: 37 - protein, 6 aa, ARTIFICIAL SEQUENCE
  Synthetic peptide
RPKYQE

SEQ ID NO: 38 - protein, 6 aa, ARTIFICIAL SEQUENCE
  Synthetic peptide
RPKHYQ

SEQ ID NO: 39 - protein, 7 aa, ARTIFICIAL SEQUENCE
  Synthetic peptide
RPKHYQE

SEQ ID NO: 40 - protein, 7 aa, ARTIFICIAL SEQUENCE
  Synthetic peptide
RPKHPYQ

SEQ ID NO: 41 - protein, 8 aa, ARTIFICIAL SEQUENCE
  Synthetic peptide
RPKHPYQE

SEQ ID NO: 42 - protein, 8 aa, ARTIFICIAL SEQUENCE
  Synthetic peptide
RPKHPIYQ

SEQ ID NO: 43 - protein, 9 aa, ARTIFICIAL SEQUENCE
  Synthetic peptide
RPKHPIYQE

SEQ ID NO: 44 - protein, 9 aa, ARTIFICIAL SEQUENCE
  Synthetic peptide
RPKHPIKYQ

SEQ ID NO: 45 - protein, 10 aa, ARTIFICIAL SEQUENCE
  Synthetic peptide
RPKHPIKYQE

SEQ ID NO: 46 - protein, 10 aa, ARTIFICIAL SEQUENCE
  Synthetic peptide
RPKHPIKHYQ

SEQ ID NO: 47 - protein, 11 aa, ARTIFICIAL SEQUENCE
  Synthetic peptide
RPKHPIKHYQE

SEQ ID NO: 48 - protein, 11 aa, ARTIFICIAL SEQUENCE
  Synthetic peptide
RPKHPIKHQYQ

SEQ ID NO: 49 - protein, 12 aa, ARTIFICIAL SEQUENCE
  Synthetic peptide
RPKHPIKHQYQE

SEQ ID NO: 50 - protein, 12 aa, ARTIFICIAL SEQUENCE
  Synthetic peptide
RPKHPIKHQGYQ

SEQ ID NO: 51 - protein, 13 aa, ARTIFICIAL SEQUENCE
  Synthetic peptide
RPKHPIKHQGYQE

SEQ ID NO: 52 - protein, 13 aa, ARTIFICIAL SEQUENCE
  Synthetic peptide
RPKHPIKHQGLYQ

SEQ ID NO: 53 - protein, 14 aa, ARTIFICIAL SEQUENCE
  Synthetic peptide
RPKHPIKHQGLYQE

SEQ ID NO: 54 - protein, 14 aa, ARTIFICIAL SEQUENCE
  Synthetic peptide
RPKHPIKHQGLPYQ

SEQ ID NO: 55 - protein, 15 aa, ARTIFICIAL SEQUENCE
  Synthetic peptide
RPKHPIKHQGLPYQE

SEQ ID NO: 56 - protein, 15 aa, ARTIFICIAL SEQUENCE
  Synthetic peptide
RPKHPIKHQGLPQYQ

SEQ ID NO: 57 - protein, 16 aa, ARTIFICIAL SEQUENCE
  Synthetic peptide
RPKHPIKHQGLPQYQE

SEQ ID NO: 58 - protein, 16 aa, ARTIFICIAL SEQUENCE
  Synthetic peptide
RPKHPIKHQGLPQEYQ

SEQ ID NO: 59 - protein, 17 aa, ARTIFICIAL SEQUENCE
  Synthetic peptide
RPKHPIKHQGLPQEYQE

SEQ ID NO: 60 - protein, 17 aa, ARTIFICIAL SEQUENCE
  Synthetic peptide
RPKHPIKHQGLPQEVYQ

SEQ ID NO: 61 - protein, 18 aa, ARTIFICIAL SEQUENCE
  Synthetic peptide
RPKHPIKHQGLPQEVYQE

SEQ ID NO: 62 - protein, 18 aa, ARTIFICIAL SEQUENCE
  Synthetic peptide
RPKHPIKHQGLPQEVLYQ

SEQ ID NO: 63 - protein, 19 aa, ARTIFICIAL SEQUENCE
  Synthetic peptide
RPKHPIKHQGLPQEVLYQE

SEQ ID NO: 64 - protein, 19 aa, ARTIFICIAL SEQUENCE
  Synthetic peptide
RPKHPIKHQGLPQEVLNYQ

SEQ ID NO: 65 - protein, 20 aa, ARTIFICIAL SEQUENCE
  Synthetic peptide
RPKHPIKHQGLPQEVLNYQE

SEQ ID NO: 66 - protein, 20 aa, ARTIFICIAL SEQUENCE
  Synthetic peptide
RPKHPIKHQGLPQEVLNEYQ

SEQ ID NO: 67 - protein, 21 aa, ARTIFICIAL SEQUENCE
  Synthetic peptide
RPKHPIKHQGLPQEVLNEYQE

SEQ ID NO: 68 - protein, 21 aa, ARTIFICIAL SEQUENCE
  Synthetic peptide
RPKHPIKHQGLPQEVLNENYQ

SEQ ID NO: 69 - protein, 22 aa, ARTIFICIAL SEQUENCE
  Synthetic peptide
RPKHPIKHQGLPQEVLNENYQE

SEQ ID NO: 70 - protein, 22 aa, ARTIFICIAL SEQUENCE
  Synthetic peptide
RPKHPIKHQGLPQEVLNENLYQ

SEQ ID NO: 71 - protein, 23 aa, ARTIFICIAL SEQUENCE
  Synthetic peptide
RPKHPIKHQGLPQEVLNENLYQE

SEQ ID NO: 72 - protein, 23 aa, ARTIFICIAL SEQUENCE
  Synthetic peptide
RPKHPIKHQGLPQEVLNENLLYQ

SEQ ID NO: 73 - protein, 24 aa, ARTIFICIAL SEQUENCE
  Synthetic peptide
RPKHPIKHQGLPQEVLNENLLYQE

SEQ ID NO: 74 - protein, 24 aa, ARTIFICIAL SEQUENCE
  Synthetic peptide
RPKHPIKHQGLPQEVLNENLLRYQ

SEQ ID NO: 75 - protein, 25 aa, ARTIFICIAL SEQUENCE
  Synthetic peptide
RPKHPIKHQGLPQEVLNENLLRYQE

SEQ ID NO: 76 - protein, 25 aa, ARTIFICIAL SEQUENCE
  Synthetic peptide
RPKHPIKHQGLPQEVLNENLLRFYQ

SEQ ID NO: 77 - protein, 26 aa, ARTIFICIAL SEQUENCE
  Synthetic peptide
RPKHPIKHQGLPQEVLNENLLRFYQE

SEQ ID NO: 78 - protein, 26 aa, ARTIFICIAL SEQUENCE
  Synthetic peptide
RPKHPIKHQGLPQEVLNENLLRFFYQ

SEQ ID NO: 79 - protein, 27 aa, ARTIFICIAL SEQUENCE
  Synthetic peptide
RPKHPIKHQGLPQEVLNENLLRFFYQE

SEQ ID NO: 80 - protein, 27 aa, ARTIFICIAL SEQUENCE
  Synthetic peptide
RPKHPIKHQGLPQEVLNENLLRFFVYQ

SEQ ID NO: 81 - protein, 28 aa, ARTIFICIAL SEQUENCE
  Synthetic peptide
RPKHPIKHQGLPQEVLNENLLRFFVYQE

SEQ ID NO: 82 - protein, 28 aa, ARTIFICIAL SEQUENCE
  Synthetic peptide
RPKHPIKHQGLPQEVLNENLLRFFVAYQ

SEQ ID NO: 83 - protein, 29 aa, ARTIFICIAL SEQUENCE
  Synthetic peptide
RPKHPIKHQGLPQEVLNENLLRFFVAYQE

SEQ ID NO: 84 - protein, 6 aa, Artificial sequence
  Synthetic peptide
RPYQEP

SEQ ID NO: 85 - protein, 7 aa, Artificial sequence
  Synthetic peptide
RPYQEPV

SEQ ID NO: 86 - protein, 7 aa, ARTIFICIAL SEQUENCE
  Synthetic peptide
RPKYQEP

SEQ ID NO: 87 - protein, 8 aa, ARTIFICIAL SEQUENCE
  Synthetic peptide
RPKYQEPV

SEQ ID NO: 88 - protein, 8 aa, ARTIFICIAL SEQUENCE
  Synthetic peptide
RPKHYQEP

SEQ ID NO: 89 - protein, 9 aa, ARTIFICIAL SEQUENCE
  Synthetic peptide
RPKHYQEPV

SEQ ID NO: 90 - protein, 9 aa, ARTIFICIAL SEQUENCE
  Synthetic peptide
RPKHPYQEP

SEQ ID NO: 91 - protein, 10 aa, ARTIFICIAL SEQUENCE
  Synthetic peptide
RPKHPYQEPV

SEQ ID NO: 92 - protein, 10 aa, ARTIFICIAL SEQUENCE
  Synthetic peptide
RPKHPIYQEP

SEQ ID NO: 93 - protein, 11 aa, ARTIFICIAL SEQUENCE
  Synthetic peptide
RPKHPIYQEPV

SEQ ID NO: 94 - protein, 11 aa, ARTIFICIAL SEQUENCE
  Synthetic peptide
RPKHPIKYQEP

SEQ ID NO: 95 - protein, 12 aa, ARTIFICIAL SEQUENCE
  Synthetic peptide
RPKHPIKYQEPV

SEQ ID NO: 96 - protein, 12 aa, ARTIFICIAL SEQUENCE
  Synthetic peptide
RPKHPIKHYQEP

SEQ ID NO: 97 - protein, 13 aa, ARTIFICIAL SEQUENCE
  Synthetic peptide
RPKHPIKHYQEPV

SEQ ID NO: 98 - protein, 13 aa, ARTIFICIAL SEQUENCE
  Synthetic peptide
RPKHPIKHQYQEP

SEQ ID NO: 99 - protein, 14 aa, ARTIFICIAL SEQUENCE
  Synthetic peptide
RPKHPIKHQYQEPV

SEQ ID NO: 100 - protein, 14 aa, ARTIFICIAL SEQUENCE
  Synthetic peptide
RPKHPIKHQGYQEP

SEQ ID NO: 101 - protein, 15 aa, ARTIFICIAL SEQUENCE
  Synthetic peptide
RPKHPIKHQGYQEPV

SEQ ID NO: 102 - protein, 15 aa, ARTIFICIAL SEQUENCE
  Synthetic peptide
RPKHPIKHQGLYQEP

SEQ ID NO: 103 - protein, 16 aa, ARTIFICIAL SEQUENCE
  Synthetic peptide
RPKHPIKHQGLYQEPV

SEQ ID NO: 104 - protein, 16 aa, ARTIFICIAL SEQUENCE
  Synthetic peptide
RPKHPIKHQGLPYQEP

SEQ ID NO: 105 - protein, 17 aa, ARTIFICIAL SEQUENCE
  Synthetic peptide
RPKHPIKHQGLPYQEPV

SEQ ID NO: 106 - protein, 17 aa, ARTIFICIAL SEQUENCE
  Synthetic peptide
RPKHPIKHQGLPQYQEP

SEQ ID NO: 107 - protein, 18 aa, ARTIFICIAL SEQUENCE
  Synthetic peptide
RPKHPIKHQGLPQYQEPV

SEQ ID NO: 108 - protein, 18 aa, ARTIFICIAL SEQUENCE
  Synthetic peptide
RPKHPIKHQGLPQEYQEP

SEQ ID NO: 109 - protein, 19 aa, ARTIFICIAL SEQUENCE
  Synthetic peptide
RPKHPIKHQGLPQEYQEPV

SEQ ID NO: 110 - protein, 19 aa, ARTIFICIAL SEQUENCE
  Synthetic peptide
RPKHPIKHQGLPQEVYQEP

SEQ ID NO: 111 - protein, 20 aa, ARTIFICIAL SEQUENCE
  Synthetic peptide
RPKHPIKHQGLPQEVYQEPV

SEQ ID NO: 112 - protein, 20 aa, ARTIFICIAL SEQUENCE
  Synthetic peptide
RPKHPIKHQGLPQEVLYQEP

SEQ ID NO: 113 - protein, 21 aa, ARTIFICIAL SEQUENCE
  Synthetic peptide
RPKHPIKHQGLPQEVLYQEPV

SEQ ID NO: 114 - protein, 21 aa, ARTIFICIAL SEQUENCE
  Synthetic peptide
RPKHPIKHQGLPQEVLNYQEP

SEQ ID NO: 115 - protein, 22 aa, ARTIFICIAL SEQUENCE
  Synthetic peptide
RPKHPIKHQGLPQEVLNYQEPV

SEQ ID NO: 116 - protein, 22 aa, ARTIFICIAL SEQUENCE
  Synthetic peptide
RPKHPIKHQGLPQEVLNEYQEP

SEQ ID NO: 117 - protein, 23 aa, ARTIFICIAL SEQUENCE
  Synthetic peptide
RPKHPIKHQGLPQEVLNEYQEPV

SEQ ID NO: 118 - protein, 23 aa, ARTIFICIAL SEQUENCE
  Synthetic peptide
RPKHPIKHQGLPQEVLNENYQEP

SEQ ID NO: 119 - protein, 24 aa, ARTIFICIAL SEQUENCE
  Synthetic peptide
RPKHPIKHQGLPQEVLNENYQEPV

SEQ ID NO: 120 - protein, 24 aa, ARTIFICIAL SEQUENCE
  Synthetic peptide
RPKHPIKHQGLPQEVLNENLYQEP

SEQ ID NO: 121 - protein, 25 aa, ARTIFICIAL SEQUENCE
  Synthetic peptide
RPKHPIKHQGLPQEVLNENLYQEPV

SEQ ID NO: 122 - protein, 25 aa, ARTIFICIAL SEQUENCE
  Synthetic peptide
RPKHPIKHQGLPQEVLNENLLYQEP

SEQ ID NO: 123 - protein, 26 aa, ARTIFICIAL SEQUENCE
  Synthetic peptide
RPKHPIKHQGLPQEVLNENLLYQEPV

SEQ ID NO: 124 - protein, 26 aa, ARTIFICIAL SEQUENCE
  Synthetic peptide
RPKHPIKHQGLPQEVLNENLLRYQEP

SEQ ID NO: 125 - protein, 27 aa, ARTIFICIAL SEQUENCE
  Synthetic peptide
RPKHPIKHQGLPQEVLNENLLRYQEPV

SEQ ID NO: 126 - protein, 27 aa, ARTIFICIAL SEQUENCE
  Synthetic peptide
RPKHPIKHQGLPQEVLNENLLRFYQEP

SEQ ID NO: 127 - protein, 28 aa, ARTIFICIAL SEQUENCE
  Synthetic peptide
RPKHPIKHQGLPQEVLNENLLRFYQEPV

SEQ ID NO: 128 - protein, 28 aa, ARTIFICIAL SEQUENCE
  Synthetic peptide
RPKHPIKHQGLPQEVLNENLLRFFYQEP

SEQ ID NO: 129 - protein, 29 aa, ARTIFICIAL SEQUENCE
  Synthetic peptide
RPKHPIKHQGLPQEVLNENLLRFFYQEPV

SEQ ID NO: 130 - protein, 29 aa, ARTIFICIAL SEQUENCE
  Synthetic peptide
RPKHPIKHQGLPQEVLNENLLRFFVYQEP

SEQ ID NO: 131 - protein, 30 aa, ARTIFICIAL SEQUENCE
  Synthetic peptide
RPKHPIKHQGLPQEVLNENLLRFFVYQEPV

SEQ ID NO: 132 - protein, 30 aa, ARTIFICIAL SEQUENCE
  Synthetic peptide
RPKHPIKHQGLPQEVLNENLLRFFVAYQEP

SEQ ID NO: 133 - protein, 31 aa, ARTIFICIAL SEQUENCE
  Synthetic peptide
RPKHPIKHQGLPQEVLNENLLRFFVAYQEPV

SEQ ID NO: 134 - protein, 8 aa, Artificial sequence
  Synthetic peptide
RPYQEPVL

SEQ ID NO: 135 - protein, 9 aa, Artificial sequence
  Synthetic peptide
RPYQEPVLG

SEQ ID NO: 136 - protein, 9 aa, ARTIFICIAL SEQUENCE
  Synthetic peptide
RPKYQEPVL

SEQ ID NO: 137 - protein, 10 aa, ARTIFICIAL SEQUENCE
  Synthetic peptide
RPKYQEPVLG

SEQ ID NO: 138 - protein, 10 aa, ARTIFICIAL SEQUENCE
  Synthetic peptide
RPKHYQEPVL

SEQ ID NO: 139 - protein, 11 aa, ARTIFICIAL SEQUENCE
  Synthetic peptide
RPKHYQEPVLG

SEQ ID NO: 140 - protein, 11 aa, ARTIFICIAL SEQUENCE
  Synthetic peptide
RPKHPYQEPVL

SEQ ID NO: 141 - protein, 12 aa, ARTIFICIAL SEQUENCE
  Synthetic peptide
RPKHPYQEPVLG

SEQ ID NO: 142 - protein, 12 aa, ARTIFICIAL SEQUENCE
  Synthetic peptide
RPKHPIYQEPVL

SEQ ID NO: 143 - protein, 13 aa, ARTIFICIAL SEQUENCE
  Synthetic peptide
RPKHPIYQEPVLG

SEQ ID NO: 144 - protein, 13 aa, ARTIFICIAL SEQUENCE
  Synthetic peptide
RPKHPIKYQEPVL

SEQ ID NO: 145 - protein, 14 aa, ARTIFICIAL SEQUENCE
  Synthetic peptide
RPKHPIKYQEPVLG

SEQ ID NO: 146 - protein, 14 aa, ARTIFICIAL SEQUENCE
  Synthetic peptide
RPKHPIKHYQEPVL

SEQ ID NO: 147 - protein, 15 aa, ARTIFICIAL SEQUENCE
  Synthetic peptide
RPKHPIKHYQEPVLG

SEQ ID NO: 148 - protein, 15 aa, ARTIFICIAL SEQUENCE
  Synthetic peptide
RPKHPIKHQYQEPVL

SEQ ID NO: 149 - protein, 16 aa, ARTIFICIAL SEQUENCE
  Synthetic peptide
RPKHPIKHQYQEPVLG

SEQ ID NO: 150 - protein, 16 aa, ARTIFICIAL SEQUENCE
  Synthetic peptide
RPKHPIKHQGYQEPVL

SEQ ID NO: 151 - protein, 17 aa, ARTIFICIAL SEQUENCE
  Synthetic peptide
RPKHPIKHQGYQEPVLG

SEQ ID NO: 152 - protein, 17 aa, ARTIFICIAL SEQUENCE
  Synthetic peptide
RPKHPIKHQGLYQEPVL

SEQ ID NO: 153 - protein, 18 aa, ARTIFICIAL SEQUENCE
  Synthetic peptide
RPKHPIKHQGLYQEPVLG

SEQ ID NO: 154 - protein, 18 aa, ARTIFICIAL SEQUENCE
  Synthetic peptide
RPKHPIKHQGLPYQEPVL

SEQ ID NO: 155 - protein, 19 aa, ARTIFICIAL SEQUENCE
  Synthetic peptide
RPKHPIKHQGLPYQEPVLG

SEQ ID NO: 156 - protein, 19 aa, ARTIFICIAL SEQUENCE
  Synthetic peptide
RPKHPIKHQGLPQYQEPVL

SEQ ID NO: 157 - protein, 20 aa, ARTIFICIAL SEQUENCE
  Synthetic peptide
RPKHPIKHQGLPQYQEPVLG

SEQ ID NO: 158 - protein, 20 aa, ARTIFICIAL SEQUENCE
  Synthetic peptide
RPKHPIKHQGLPQEYQEPVL

SEQ ID NO: 159 - protein, 21 aa, ARTIFICIAL SEQUENCE
  Synthetic peptide
RPKHPIKHQGLPQEYQEPVLG

SEQ ID NO: 160 - protein, 21 aa, ARTIFICIAL SEQUENCE
  Synthetic peptide
RPKHPIKHQGLPQEVYQEPVL

SEQ ID NO: 161 - protein, 22 aa, ARTIFICIAL SEQUENCE
  Synthetic peptide
RPKHPIKHQGLPQEVYQEPVLG

SEQ ID NO: 162 - protein, 22 aa, ARTIFICIAL SEQUENCE
  Synthetic peptide
RPKHPIKHQGLPQEVLYQEPVL

SEQ ID NO: 163 - protein, 23 aa, ARTIFICIAL SEQUENCE
  Synthetic peptide
RPKHPIKHQGLPQEVLYQEPVLG

SEQ ID NO: 164 - protein, 23 aa, ARTIFICIAL SEQUENCE
  Synthetic peptide
RPKHPIKHQGLPQEVLNYQEPVL

SEQ ID NO: 165 - protein, 24 aa, ARTIFICIAL SEQUENCE
  Synthetic peptide
RPKHPIKHQGLPQEVLNYQEPVLG

SEQ ID NO: 166 - protein, 24 aa, ARTIFICIAL SEQUENCE
  Synthetic peptide
RPKHPIKHQGLPQEVLNEYQEPVL

SEQ ID NO: 167 - protein, 25 aa, ARTIFICIAL SEQUENCE
  Synthetic peptide
RPKHPIKHQGLPQEVLNEYQEPVLG

SEQ ID NO: 168 - protein, 25 aa, ARTIFICIAL SEQUENCE
  Synthetic peptide
RPKHPIKHQGLPQEVLNENYQEPVL

SEQ ID NO: 169 - protein, 26 aa, ARTIFICIAL SEQUENCE
  Synthetic peptide
RPKHPIKHQGLPQEVLNENYQEPVLG

SEQ ID NO: 170 - protein, 26 aa, ARTIFICIAL SEQUENCE
  Synthetic peptide
RPKHPIKHQGLPQEVLNENLYQEPVL

SEQ ID NO: 171 - protein, 27 aa, ARTIFICIAL SEQUENCE
  Synthetic peptide
RPKHPIKHQGLPQEVLNENLYQEPVLG

SEQ ID NO: 172 - protein, 27 aa, ARTIFICIAL SEQUENCE
  Synthetic peptide
RPKHPIKHQGLPQEVLNENLLYQEPVL

SEQ ID NO: 173 - protein, 28 aa, ARTIFICIAL SEQUENCE
  Synthetic peptide
RPKHPIKHQGLPQEVLNENLLYQEPVLG

SEQ ID NO: 174 - protein, 28 aa, ARTIFICIAL SEQUENCE
  Synthetic peptide
RPKHPIKHQGLPQEVLNENLLRYQEPVL

SEQ ID NO: 175 - protein, 29 aa, ARTIFICIAL SEQUENCE
  Synthetic peptide
RPKHPIKHQGLPQEVLNENLLRYQEPVLG

SEQ ID NO: 176 - protein, 29 aa, ARTIFICIAL SEQUENCE
  Synthetic peptide
RPKHPIKHQGLPQEVLNENLLRFYQEPVL

SEQ ID NO: 177 - protein, 30 aa, ARTIFICIAL SEQUENCE
  Synthetic peptide
RPKHPIKHQGLPQEVLNENLLRFYQEPVLG

SEQ ID NO: 178 - protein, 30 aa, ARTIFICIAL SEQUENCE
  Synthetic peptide
RPKHPIKHQGLPQEVLNENLLRFFYQEPVL

SEQ ID NO: 179 - protein, 31 aa, ARTIFICIAL SEQUENCE
  Synthetic peptide
RPKHPIKHQGLPQEVLNENLLRFFYQEPVLG

SEQ ID NO: 180 - protein, 31 aa, ARTIFICIAL SEQUENCE
  Synthetic peptide
RPKHPIKHQGLPQEVLNENLLRFFVYQEPVL

SEQ ID NO: 181 - protein, 32 aa, ARTIFICIAL SEQUENCE
  Synthetic peptide
RPKHPIKHQGLPQEVLNENLLRFFVYQEPVLG

SEQ ID NO: 182 - protein, 32 aa, ARTIFICIAL SEQUENCE
  Synthetic peptide
RPKHPIKHQGLPQEVLNENLLRFFVAYQEPVL

SEQ ID NO: 183 - protein, 33 aa, ARTIFICIAL SEQUENCE
  Synthetic peptide
RPKHPIKHQGLPQEVLNENLLRFFVAYQEPVLG

SEQ ID NO: 184 - protein, 10 aa, Artificial sequence
  Synthetic peptide
RPYQEPVLGP

SEQ ID NO: 185 - protein, 11 aa, Artificial sequence
  Synthetic peptide
RPYQEPVLGPV

SEQ ID NO: 186 - protein, 11 aa, ARTIFICIAL SEQUENCE
  Synthetic peptide
RPKYQEPVLGP

SEQ ID NO: 187 - protein, 12 aa, ARTIFICIAL SEQUENCE
  Synthetic peptide
RPKYQEPVLGPV

SEQ ID NO: 188 - protein, 12 aa, ARTIFICIAL SEQUENCE
  Synthetic peptide
RPKHYQEPVLGP

SEQ ID NO: 189 - protein, 13 aa, ARTIFICIAL SEQUENCE
  Synthetic peptide
RPKHYQEPVLGPV

SEQ ID NO: 190 - protein, 13 aa, ARTIFICIAL SEQUENCE
  Synthetic peptide
RPKHPYQEPVLGP

SEQ ID NO: 191 - protein, 14 aa, ARTIFICIAL SEQUENCE
  Synthetic peptide
RPKHPYQEPVLGPV

SEQ ID NO: 192 - protein, 14 aa, ARTIFICIAL SEQUENCE
  Synthetic peptide
RPKHPIYQEPVLGP

SEQ ID NO: 193 - protein, 15 aa, ARTIFICIAL SEQUENCE
  Synthetic peptide
RPKHPIYQEPVLGPV

SEQ ID NO: 194 - protein, 15 aa, ARTIFICIAL SEQUENCE
  Synthetic peptide
RPKHPIKYQEPVLGP

SEQ ID NO: 195 - protein, 16 aa, ARTIFICIAL SEQUENCE
  Synthetic peptide
RPKHPIKYQEPVLGPV

SEQ ID NO: 196 - protein, 16 aa, ARTIFICIAL SEQUENCE
  Synthetic peptide
RPKHPIKHYQEPVLGP

SEQ ID NO: 197 - protein, 17 aa, ARTIFICIAL SEQUENCE
  Synthetic peptide
RPKHPIKHYQEPVLGPV

SEQ ID NO: 198 - protein, 17 aa, ARTIFICIAL SEQUENCE
  Synthetic peptide
RPKHPIKHQYQEPVLGP

SEQ ID NO: 199 - protein, 18 aa, ARTIFICIAL SEQUENCE
  Synthetic peptide
RPKHPIKHQYQEPVLGPV

SEQ ID NO: 200 - protein, 18 aa, ARTIFICIAL SEQUENCE
  Synthetic peptide
RPKHPIKHQGYQEPVLGP

SEQ ID NO: 201 - protein, 19 aa, ARTIFICIAL SEQUENCE
  Synthetic peptide
RPKHPIKHQGYQEPVLGPV

SEQ ID NO: 202 - protein, 19 aa, ARTIFICIAL SEQUENCE
  Synthetic peptide
RPKHPIKHQGLYQEPVLGP

SEQ ID NO: 203 - protein, 20 aa, ARTIFICIAL SEQUENCE
  Synthetic peptide
RPKHPIKHQGLYQEPVLGPV

SEQ ID NO: 204 - protein, 20 aa, ARTIFICIAL SEQUENCE
  Synthetic peptide
RPKHPIKHQGLPYQEPVLGP

SEQ ID NO: 205 - protein, 21 aa, ARTIFICIAL SEQUENCE
  Synthetic peptide
RPKHPIKHQGLPYQEPVLGPV

SEQ ID NO: 206 - protein, 21 aa, ARTIFICIAL SEQUENCE
  Synthetic peptide
RPKHPIKHQGLPQYQEPVLGP

SEQ ID NO: 207 - protein, 22 aa, ARTIFICIAL SEQUENCE
  Synthetic peptide
RPKHPIKHQGLPQYQEPVLGPV

SEQ ID NO: 208 - protein, 22 aa, ARTIFICIAL SEQUENCE
  Synthetic peptide
RPKHPIKHQGLPQEYQEPVLGP

SEQ ID NO: 209 - protein, 23 aa, ARTIFICIAL SEQUENCE
  Synthetic peptide
RPKHPIKHQGLPQEYQEPVLGPV

SEQ ID NO: 210 - protein, 23 aa, ARTIFICIAL SEQUENCE
  Synthetic peptide
RPKHPIKHQGLPQEVYQEPVLGP

SEQ ID NO: 211 - protein, 24 aa, ARTIFICIAL SEQUENCE
  Synthetic peptide
RPKHPIKHQGLPQEVYQEPVLGPV

SEQ ID NO: 212 - protein, 24 aa, ARTIFICIAL SEQUENCE
  Synthetic peptide
RPKHPIKHQGLPQEVLYQEPVLGP

SEQ ID NO: 213 - protein, 25 aa, ARTIFICIAL SEQUENCE
  Synthetic peptide
RPKHPIKHQGLPQEVLYQEPVLGPV

SEQ ID NO: 214 - protein, 25 aa, ARTIFICIAL SEQUENCE
  Synthetic peptide
RPKHPIKHQGLPQEVLNYQEPVLGP

SEQ ID NO: 215 - protein, 26 aa, ARTIFICIAL SEQUENCE
  Synthetic peptide
RPKHPIKHQGLPQEVLNYQEPVLGPV

SEQ ID NO: 216 - protein, 26 aa, ARTIFICIAL SEQUENCE
  Synthetic peptide
RPKHPIKHQGLPQEVLNEYQEPVLGP

SEQ ID NO: 217 - protein, 27 aa, ARTIFICIAL SEQUENCE
  Synthetic peptide
RPKHPIKHQGLPQEVLNEYQEPVLGPV

SEQ ID NO: 218 - protein, 27 aa, ARTIFICIAL SEQUENCE
  Synthetic peptide
RPKHPIKHQGLPQEVLNENYQEPVLGP

SEQ ID NO: 219 - protein, 28 aa, ARTIFICIAL SEQUENCE
  Synthetic peptide
RPKHPIKHQGLPQEVLNENYQEPVLGPV

SEQ ID NO: 220 - protein, 28 aa, ARTIFICIAL SEQUENCE
  Synthetic peptide
RPKHPIKHQGLPQEVLNENLYQEPVLGP

SEQ ID NO: 221 - protein, 29 aa, ARTIFICIAL SEQUENCE
  Synthetic peptide
RPKHPIKHQGLPQEVLNENLYQEPVLGPV

SEQ ID NO: 222 - protein, 29 aa, ARTIFICIAL SEQUENCE
  Synthetic peptide
RPKHPIKHQGLPQEVLNENLLYQEPVLGP

SEQ ID NO: 223 - protein, 30 aa, ARTIFICIAL SEQUENCE
  Synthetic peptide
RPKHPIKHQGLPQEVLNENLLYQEPVLGPV

SEQ ID NO: 224 - protein, 30 aa, ARTIFICIAL SEQUENCE
  Synthetic peptide
RPKHPIKHQGLPQEVLNENLLRYQEPVLGP

SEQ ID NO: 225 - protein, 31 aa, ARTIFICIAL SEQUENCE
  Synthetic peptide
RPKHPIKHQGLPQEVLNENLLRYQEPVLGPV

SEQ ID NO: 226 - protein, 31 aa, ARTIFICIAL SEQUENCE
  Synthetic peptide
RPKHPIKHQGLPQEVLNENLLRFYQEPVLGP

SEQ ID NO: 227 - protein, 32 aa, ARTIFICIAL SEQUENCE
  Synthetic peptide
RPKHPIKHQGLPQEVLNENLLRFYQEPVLGPV

SEQ ID NO: 228 - protein, 32 aa, ARTIFICIAL SEQUENCE
  Synthetic peptide
RPKHPIKHQGLPQEVLNENLLRFFYQEPVLGP

SEQ ID NO: 229 - protein, 33 aa, ARTIFICIAL SEQUENCE
  Synthetic peptide
RPKHPIKHQGLPQEVLNENLLRFFYQEPVLGPV

SEQ ID NO: 230 - protein, 33 aa, ARTIFICIAL SEQUENCE
  Synthetic peptide
RPKHPIKHQGLPQEVLNENLLRFFVYQEPVLGP

SEQ ID NO: 231 - protein, 34 aa, ARTIFICIAL SEQUENCE
  Synthetic peptide
RPKHPIKHQGLPQEVLNENLLRFFVYQEPVLGPV

SEQ ID NO: 232 - protein, 34 aa, ARTIFICIAL SEQUENCE
  Synthetic peptide
RPKHPIKHQGLPQEVLNENLLRFFVAYQEPVLGP

SEQ ID NO: 233 - protein, 35 aa, ARTIFICIAL SEQUENCE
  Synthetic peptide
RPKHPIKHQGLPQEVLNENLLRFFVAYQEPVLGPV

SEQ ID NO: 234 - protein, 12 aa, Artificial sequence
  Synthetic peptide
RPYQEPVLGPVR

SEQ ID NO: 235 - protein, 13 aa, Artificial sequence
  Synthetic peptide
RPYQEPVLGPVRG

SEQ ID NO: 236 - protein, 13 aa, ARTIFICIAL SEQUENCE
  Synthetic peptide
RPKYQEPVLGPVR

SEQ ID NO: 237 - protein, 14 aa, ARTIFICIAL SEQUENCE
  Synthetic peptide
RPKYQEPVLGPVRG

SEQ ID NO: 238 - protein, 14 aa, ARTIFICIAL SEQUENCE
  Synthetic peptide
RPKHYQEPVLGPVR

SEQ ID NO: 239 - protein, 15 aa, ARTIFICIAL SEQUENCE
  Synthetic peptide
RPKHYQEPVLGPVRG

SEQ ID NO: 240 - protein, 15 aa, ARTIFICIAL SEQUENCE
  Synthetic peptide
RPKHPYQEPVLGPVR

SEQ ID NO: 241 - protein, 16 aa, ARTIFICIAL SEQUENCE
  Synthetic peptide
RPKHPYQEPVLGPVRG

SEQ ID NO: 242 - protein, 16 aa, ARTIFICIAL SEQUENCE
  Synthetic peptide
RPKHPIYQEPVLGPVR

SEQ ID NO: 243 - protein, 17 aa, ARTIFICIAL SEQUENCE
  Synthetic peptide
RPKHPIYQEPVLGPVRG

SEQ ID NO: 244 - protein, 17 aa, ARTIFICIAL SEQUENCE
  Synthetic peptide
RPKHPIKYQEPVLGPVR

SEQ ID NO: 245 - protein, 18 aa, ARTIFICIAL SEQUENCE
  Synthetic peptide
RPKHPIKYQEPVLGPVRG

SEQ ID NO: 246 - protein, 18 aa, ARTIFICIAL SEQUENCE
  Synthetic peptide
RPKHPIKHYQEPVLGPVR

SEQ ID NO: 247 - protein, 19 aa, ARTIFICIAL SEQUENCE
  Synthetic peptide
RPKHPIKHYQEPVLGPVRG

SEQ ID NO: 248 - protein, 19 aa, ARTIFICIAL SEQUENCE
  Synthetic peptide
RPKHPIKHQYQEPVLGPVR

SEQ ID NO: 249 - protein, 20 aa, ARTIFICIAL SEQUENCE
  Synthetic peptide
RPKHPIKHQYQEPVLGPVRG

SEQ ID NO: 250 - protein, 20 aa, ARTIFICIAL SEQUENCE
  Synthetic peptide
RPKHPIKHQGYQEPVLGPVR

SEQ ID NO: 251 - protein, 21 aa, ARTIFICIAL SEQUENCE
  Synthetic peptide
RPKHPIKHQGYQEPVLGPVRG

SEQ ID NO: 252 - protein, 21 aa, ARTIFICIAL SEQUENCE
  Synthetic peptide
RPKHPIKHQGLYQEPVLGPVR

SEQ ID NO: 253 - protein, 22 aa, ARTIFICIAL SEQUENCE
  Synthetic peptide
RPKHPIKHQGLYQEPVLGPVRG

SEQ ID NO: 254 - protein, 22 aa, ARTIFICIAL SEQUENCE
  Synthetic peptide
RPKHPIKHQGLPYQEPVLGPVR

SEQ ID NO: 255 - protein, 23 aa, ARTIFICIAL SEQUENCE
  Synthetic peptide
RPKHPIKHQGLPYQEPVLGPVRG

SEQ ID NO: 256 - protein, 23 aa, ARTIFICIAL SEQUENCE
  Synthetic peptide
RPKHPIKHQGLPQYQEPVLGPVR

SEQ ID NO: 257 - protein, 24 aa, ARTIFICIAL SEQUENCE
  Synthetic peptide
RPKHPIKHQGLPQYQEPVLGPVRG

SEQ ID NO: 258 - protein, 24 aa, ARTIFICIAL SEQUENCE
  Synthetic peptide
RPKHPIKHQGLPQEYQEPVLGPVR

SEQ ID NO: 259 - protein, 25 aa, ARTIFICIAL SEQUENCE
  Synthetic peptide
RPKHPIKHQGLPQEYQEPVLGPVRG

SEQ ID NO: 260 - protein, 25 aa, ARTIFICIAL SEQUENCE
  Synthetic peptide
RPKHPIKHQGLPQEVYQEPVLGPVR

SEQ ID NO: 261 - protein, 26 aa, ARTIFICIAL SEQUENCE
  Synthetic peptide
RPKHPIKHQGLPQEVYQEPVLGPVRG

SEQ ID NO: 262 - protein, 26 aa, ARTIFICIAL SEQUENCE
  Synthetic peptide
RPKHPIKHQGLPQEVLYQEPVLGPVR

SEQ ID NO: 263 - protein, 27 aa, ARTIFICIAL SEQUENCE
  Synthetic peptide
RPKHPIKHQGLPQEVLYQEPVLGPVRG

SEQ ID NO: 264 - protein, 27 aa, ARTIFICIAL SEQUENCE
  Synthetic peptide
RPKHPIKHQGLPQEVLNYQEPVLGPVR

SEQ ID NO: 265 - protein, 28 aa, ARTIFICIAL SEQUENCE
  Synthetic peptide
RPKHPIKHQGLPQEVLNYQEPVLGPVRG

SEQ ID NO: 266 - protein, 28 aa, ARTIFICIAL SEQUENCE
  Synthetic peptide
RPKHPIKHQGLPQEVLNEYQEPVLGPVR

SEQ ID NO: 267 - protein, 29 aa, ARTIFICIAL SEQUENCE
  Synthetic peptide
RPKHPIKHQGLPQEVLNEYQEPVLGPVRG

SEQ ID NO: 268 - protein, 29 aa, ARTIFICIAL SEQUENCE
  Synthetic peptide
RPKHPIKHQGLPQEVLNENYQEPVLGPVR

SEQ ID NO: 269 - protein, 30 aa, ARTIFICIAL SEQUENCE
  Synthetic peptide
RPKHPIKHQGLPQEVLNENYQEPVLGPVRG

SEQ ID NO: 270 - protein, 30 aa, ARTIFICIAL SEQUENCE
  Synthetic peptide
RPKHPIKHQGLPQEVLNENLYQEPVLGPVR

SEQ ID NO: 271 - protein, 31 aa, ARTIFICIAL SEQUENCE
  Synthetic peptide
RPKHPIKHQGLPQEVLNENLYQEPVLGPVRG

SEQ ID NO: 272 - protein, 31 aa, ARTIFICIAL SEQUENCE
  Synthetic peptide
RPKHPIKHQGLPQEVLNENLLYQEPVLGPVR

SEQ ID NO: 273 - protein, 32 aa, ARTIFICIAL SEQUENCE
  Synthetic peptide
RPKHPIKHQGLPQEVLNENLLYQEPVLGPVRG

SEQ ID NO: 274 - protein, 32 aa, ARTIFICIAL SEQUENCE
  Synthetic peptide
RPKHPIKHQGLPQEVLNENLLRYQEPVLGPVR

SEQ ID NO: 275 - protein, 33 aa, ARTIFICIAL SEQUENCE
  Synthetic peptide
RPKHPIKHQGLPQEVLNENLLRYQEPVLGPVRG

SEQ ID NO: 276 - protein, 33 aa, ARTIFICIAL SEQUENCE
  Synthetic peptide
RPKHPIKHQGLPQEVLNENLLRFYQEPVLGPVR

SEQ ID NO: 277 - protein, 34 aa, ARTIFICIAL SEQUENCE
  Synthetic peptide
RPKHPIKHQGLPQEVLNENLLRFYQEPVLGPVRG

SEQ ID NO: 278 - protein, 34 aa, ARTIFICIAL SEQUENCE
  Synthetic peptide
RPKHPIKHQGLPQEVLNENLLRFFYQEPVLGPVR

SEQ ID NO: 279 - protein, 35 aa, ARTIFICIAL SEQUENCE
  Synthetic peptide
RPKHPIKHQGLPQEVLNENLLRFFYQEPVLGPVRG

SEQ ID NO: 280 - protein, 35 aa, ARTIFICIAL SEQUENCE
  Synthetic peptide
RPKHPIKHQGLPQEVLNENLLRFFVYQEPVLGPVR

SEQ ID NO: 281 - protein, 36 aa, ARTIFICIAL SEQUENCE
  Synthetic peptide
RPKHPIKHQGLPQEVLNENLLRFFVYQEPVLGPVRG

SEQ ID NO: 282 - protein, 36 aa, ARTIFICIAL SEQUENCE
  Synthetic peptide
RPKHPIKHQGLPQEVLNENLLRFFVAYQEPVLGPVR

SEQ ID NO: 283 - protein, 37 aa, ARTIFICIAL SEQUENCE
  Synthetic peptide
RPKHPIKHQGLPQEVLNENLLRFFVAYQEPVLGPVRG

SEQ ID NO: 284 - protein, 14 aa, Artificial sequence
  Synthetic peptide
RPYQEPVLGPVRGP

SEQ ID NO: 285 - protein, 15 aa, Artificial sequence
  Synthetic peptide
RPYQEPVLGPVRGPF

SEQ ID NO: 286 - protein, 15 aa, ARTIFICIAL SEQUENCE
  Synthetic peptide
RPKYQEPVLGPVRGP

SEQ ID NO: 287 - protein, 16 aa, ARTIFICIAL SEQUENCE
  Synthetic peptide
RPKYQEPVLGPVRGPF

SEQ ID NO: 288 - protein, 16 aa, ARTIFICIAL SEQUENCE
  Synthetic peptide
RPKHYQEPVLGPVRGP

SEQ ID NO: 289 - protein, 17 aa, ARTIFICIAL SEQUENCE
  Synthetic peptide
RPKHYQEPVLGPVRGPF

SEQ ID NO: 290 - protein, 17 aa, ARTIFICIAL SEQUENCE
  Synthetic peptide
RPKHPYQEPVLGPVRGP

SEQ ID NO: 291 - protein, 18 aa, ARTIFICIAL SEQUENCE
  Synthetic peptide
RPKHPYQEPVLGPVRGPF

SEQ ID NO: 292 - protein, 18 aa, ARTIFICIAL SEQUENCE
  Synthetic peptide
RPKHPIYQEPVLGPVRGP

SEQ ID NO: 293 - protein, 19 aa, ARTIFICIAL SEQUENCE
  Synthetic peptide
RPKHPIYQEPVLGPVRGPF

SEQ ID NO: 294 - protein, 19 aa, ARTIFICIAL SEQUENCE
  Synthetic peptide
RPKHPIKYQEPVLGPVRGP

SEQ ID NO: 295 - protein, 20 aa, ARTIFICIAL SEQUENCE
  Synthetic peptide
RPKHPIKYQEPVLGPVRGPF

SEQ ID NO: 296 - protein, 20 aa, ARTIFICIAL SEQUENCE
  Synthetic peptide
RPKHPIKHYQEPVLGPVRGP

SEQ ID NO: 297 - protein, 21 aa, ARTIFICIAL SEQUENCE
  Synthetic peptide
RPKHPIKHYQEPVLGPVRGPF

SEQ ID NO: 298 - protein, 21 aa, ARTIFICIAL SEQUENCE
  Synthetic peptide
RPKHPIKHQYQEPVLGPVRGP

SEQ ID NO: 299 - protein, 22 aa, ARTIFICIAL SEQUENCE
  Synthetic peptide
RPKHPIKHQYQEPVLGPVRGPF

SEQ ID NO: 300 - protein, 22 aa, ARTIFICIAL SEQUENCE
  Synthetic peptide
RPKHPIKHQGYQEPVLGPVRGP

SEQ ID NO: 301 - protein, 23 aa, ARTIFICIAL SEQUENCE
  Synthetic peptide
RPKHPIKHQGYQEPVLGPVRGPF

SEQ ID NO: 302 - protein, 23 aa, ARTIFICIAL SEQUENCE
  Synthetic peptide
RPKHPIKHQGLYQEPVLGPVRGP

SEQ ID NO: 303 - protein, 24 aa, ARTIFICIAL SEQUENCE
  Synthetic peptide
RPKHPIKHQGLYQEPVLGPVRGPF

SEQ ID NO: 304 - protein, 24 aa, ARTIFICIAL SEQUENCE
  Synthetic peptide
RPKHPIKHQGLPYQEPVLGPVRGP

SEQ ID NO: 305 - protein, 25 aa, ARTIFICIAL SEQUENCE
  Synthetic peptide
RPKHPIKHQGLPYQEPVLGPVRGPF

SEQ ID NO: 306 - protein, 25 aa, ARTIFICIAL SEQUENCE
  Synthetic peptide
RPKHPIKHQGLPQYQEPVLGPVRGP

SEQ ID NO: 307 - protein, 26 aa, ARTIFICIAL SEQUENCE
  Synthetic peptide
RPKHPIKHQGLPQYQEPVLGPVRGPF

SEQ ID NO: 308 - protein, 26 aa, ARTIFICIAL SEQUENCE
  Synthetic peptide
RPKHPIKHQGLPQEYQEPVLGPVRGP

SEQ ID NO: 309 - protein, 27 aa, ARTIFICIAL SEQUENCE
  Synthetic peptide
RPKHPIKHQGLPQEYQEPVLGPVRGPF

SEQ ID NO: 310 - protein, 27 aa, ARTIFICIAL SEQUENCE
  Synthetic peptide
RPKHPIKHQGLPQEVYQEPVLGPVRGP

SEQ ID NO: 311 - protein, 28 aa, ARTIFICIAL SEQUENCE
  Synthetic peptide
RPKHPIKHQGLPQEVYQEPVLGPVRGPF

SEQ ID NO: 312 - protein, 28 aa, ARTIFICIAL SEQUENCE
  Synthetic peptide
RPKHPIKHQGLPQEVLYQEPVLGPVRGP

SEQ ID NO: 313 - protein, 29 aa, ARTIFICIAL SEQUENCE
  Synthetic peptide
RPKHPIKHQGLPQEVLYQEPVLGPVRGPF

SEQ ID NO: 314 - protein, 29 aa, ARTIFICIAL SEQUENCE
  Synthetic peptide
RPKHPIKHQGLPQEVLNYQEPVLGPVRGP

SEQ ID NO: 315 - protein, 30 aa, ARTIFICIAL SEQUENCE
  Synthetic peptide
RPKHPIKHQGLPQEVLNYQEPVLGPVRGPF

SEQ ID NO: 316 - protein, 30 aa, ARTIFICIAL SEQUENCE
  Synthetic peptide
RPKHPIKHQGLPQEVLNEYQEPVLGPVRGP

SEQ ID NO: 317 - protein, 31 aa, ARTIFICIAL SEQUENCE
  Synthetic peptide
RPKHPIKHQGLPQEVLNEYQEPVLGPVRGPF

SEQ ID NO: 318 - protein, 31 aa, ARTIFICIAL SEQUENCE
  Synthetic peptide
RPKHPIKHQGLPQEVLNENYQEPVLGPVRGP

SEQ ID NO: 319 - protein, 32 aa, ARTIFICIAL SEQUENCE
  Synthetic peptide
RPKHPIKHQGLPQEVLNENYQEPVLGPVRGPF

SEQ ID NO: 320 - protein, 32 aa, ARTIFICIAL SEQUENCE
  Synthetic peptide
RPKHPIKHQGLPQEVLNENLYQEPVLGPVRGP

SEQ ID NO: 321 - protein, 33 aa, ARTIFICIAL SEQUENCE
  Synthetic peptide
RPKHPIKHQGLPQEVLNENLYQEPVLGPVRGPF

SEQ ID NO: 322 - protein, 33 aa, ARTIFICIAL SEQUENCE
  Synthetic peptide
RPKHPIKHQGLPQEVLNENLLYQEPVLGPVRGP

SEQ ID NO: 323 - protein, 34 aa, ARTIFICIAL SEQUENCE
  Synthetic peptide
RPKHPIKHQGLPQEVLNENLLYQEPVLGPVRGPF

SEQ ID NO: 324 - protein, 34 aa, ARTIFICIAL SEQUENCE
  Synthetic peptide
RPKHPIKHQGLPQEVLNENLLRYQEPVLGPVRGP

SEQ ID NO: 325 - protein, 35 aa, ARTIFICIAL SEQUENCE
  Synthetic peptide
RPKHPIKHQGLPQEVLNENLLRYQEPVLGPVRGPF

SEQ ID NO: 326 - protein, 35 aa, ARTIFICIAL SEQUENCE
  Synthetic peptide
RPKHPIKHQGLPQEVLNENLLRFYQEPVLGPVRGP

SEQ ID NO: 327 - protein, 36 aa, ARTIFICIAL SEQUENCE
  Synthetic peptide
RPKHPIKHQGLPQEVLNENLLRFYQEPVLGPVRGPF

SEQ ID NO: 328 - protein, 36 aa, ARTIFICIAL SEQUENCE
  Synthetic peptide
RPKHPIKHQGLPQEVLNENLLRFFYQEPVLGPVRGP

SEQ ID NO: 329 - protein, 37 aa, ARTIFICIAL SEQUENCE
  Synthetic peptide
RPKHPIKHQGLPQEVLNENLLRFFYQEPVLGPVRGPF

SEQ ID NO: 330 - protein, 37 aa, ARTIFICIAL SEQUENCE
  Synthetic peptide
RPKHPIKHQGLPQEVLNENLLRFFVYQEPVLGPVRGP

SEQ ID NO: 331 - protein, 38 aa, ARTIFICIAL SEQUENCE
  Synthetic peptide
RPKHPIKHQGLPQEVLNENLLRFFVYQEPVLGPVRGPF

SEQ ID NO: 332 - protein, 38 aa, ARTIFICIAL SEQUENCE
  Synthetic peptide
RPKHPIKHQGLPQEVLNENLLRFFVAYQEPVLGPVRGP

SEQ ID NO: 333 - protein, 39 aa, ARTIFICIAL SEQUENCE
  Synthetic peptide
RPKHPIKHQGLPQEVLNENLLRFFVAYQEPVLGPVRGPF

SEQ ID NO: 334 - protein, 16 aa, Artificial sequence
  Synthetic peptide
RPYQEPVLGPVRGPFP

SEQ ID NO: 335 - protein, 17 aa, Artificial sequence
  Synthetic peptide
RPYQEPVLGPVRGPFPI

SEQ ID NO: 336 - protein, 17 aa, ARTIFICIAL SEQUENCE
  Synthetic peptide
RPKYQEPVLGPVRGPFP

SEQ ID NO: 337 - protein, 18 aa, ARTIFICIAL SEQUENCE
  Synthetic peptide
RPKYQEPVLGPVRGPFPI

SEQ ID NO: 338 - protein, 18 aa, ARTIFICIAL SEQUENCE
  Synthetic peptide
RPKHYQEPVLGPVRGPFP

SEQ ID NO: 339 - protein, 19 aa, ARTIFICIAL SEQUENCE
  Synthetic peptide
RPKHYQEPVLGPVRGPFPI

SEQ ID NO: 340 - protein, 19 aa, ARTIFICIAL SEQUENCE
  Synthetic peptide
RPKHPYQEPVLGPVRGPFP

SEQ ID NO: 341 - protein, 20 aa, ARTIFICIAL SEQUENCE
  Synthetic peptide
RPKHPYQEPVLGPVRGPFPI

SEQ ID NO: 342 - protein, 20 aa, ARTIFICIAL SEQUENCE
  Synthetic peptide
RPKHPIYQEPVLGPVRGPFP

SEQ ID NO: 343 - protein, 21 aa, ARTIFICIAL SEQUENCE
  Synthetic peptide
RPKHPIYQEPVLGPVRGPFPI

SEQ ID NO: 344 - protein, 21 aa, ARTIFICIAL SEQUENCE
  Synthetic peptide
RPKHPIKYQEPVLGPVRGPFP

SEQ ID NO: 345 - protein, 22 aa, ARTIFICIAL SEQUENCE
  Synthetic peptide
RPKHPIKYQEPVLGPVRGPFPI

SEQ ID NO: 346 - protein, 22 aa, ARTIFICIAL SEQUENCE
  Synthetic peptide
RPKHPIKHYQEPVLGPVRGPFP

SEQ ID NO: 347 - protein, 23 aa, ARTIFICIAL SEQUENCE
  Synthetic peptide
RPKHPIKHYQEPVLGPVRGPFPI

SEQ ID NO: 348 - protein, 23 aa, ARTIFICIAL SEQUENCE
  Synthetic peptide
RPKHPIKHQYQEPVLGPVRGPFP

SEQ ID NO: 349 - protein, 24 aa, ARTIFICIAL SEQUENCE
  Synthetic peptide
RPKHPIKHQYQEPVLGPVRGPFPI

SEQ ID NO: 350 - protein, 24 aa, ARTIFICIAL SEQUENCE
  Synthetic peptide
RPKHPIKHQGYQEPVLGPVRGPFP

SEQ ID NO: 351 - protein, 25 aa, ARTIFICIAL SEQUENCE
  Synthetic peptide
RPKHPIKHQGYQEPVLGPVRGPFPI

SEQ ID NO: 352 - protein, 25 aa, ARTIFICIAL SEQUENCE
  Synthetic peptide
RPKHPIKHQGLYQEPVLGPVRGPFP

SEQ ID NO: 353 - protein, 26 aa, ARTIFICIAL SEQUENCE
  Synthetic peptide
RPKHPIKHQGLYQEPVLGPVRGPFPI

SEQ ID NO: 354 - protein, 26 aa, ARTIFICIAL SEQUENCE
  Synthetic peptide
RPKHPIKHQGLPYQEPVLGPVRGPFP

SEQ ID NO: 355 - protein, 27 aa, ARTIFICIAL SEQUENCE
  Synthetic peptide
RPKHPIKHQGLPYQEPVLGPVRGPFPI

SEQ ID NO: 356 - protein, 27 aa, ARTIFICIAL SEQUENCE
  Synthetic peptide
RPKHPIKHQGLPQYQEPVLGPVRGPFP

SEQ ID NO: 357 - protein, 28 aa, ARTIFICIAL SEQUENCE
  Synthetic peptide
RPKHPIKHQGLPQYQEPVLGPVRGPFPI

SEQ ID NO: 358 - protein, 28 aa, ARTIFICIAL SEQUENCE
  Synthetic peptide
RPKHPIKHQGLPQEYQEPVLGPVRGPFP

SEQ ID NO: 359 - protein, 29 aa, ARTIFICIAL SEQUENCE
  Synthetic peptide
RPKHPIKHQGLPQEYQEPVLGPVRGPFPI

SEQ ID NO: 360 - protein, 29 aa, ARTIFICIAL SEQUENCE
  Synthetic peptide
RPKHPIKHQGLPQEVYQEPVLGPVRGPFP

SEQ ID NO: 361 - protein, 30 aa, ARTIFICIAL SEQUENCE
  Synthetic peptide
RPKHPIKHQGLPQEVYQEPVLGPVRGPFPI

SEQ ID NO: 362 - protein, 30 aa, ARTIFICIAL SEQUENCE
  Synthetic peptide
RPKHPIKHQGLPQEVLYQEPVLGPVRGPFP

SEQ ID NO: 363 - protein, 31 aa, ARTIFICIAL SEQUENCE
  Synthetic peptide
RPKHPIKHQGLPQEVLYQEPVLGPVRGPFPI

SEQ ID NO: 364 - protein, 31 aa, ARTIFICIAL SEQUENCE
  Synthetic peptide
RPKHPIKHQGLPQEVLNYQEPVLGPVRGPFP

SEQ ID NO: 365 - protein, 32 aa, ARTIFICIAL SEQUENCE
  Synthetic peptide
RPKHPIKHQGLPQEVLNYQEPVLGPVRGPFPI

SEQ ID NO: 366 - protein, 32 aa, ARTIFICIAL SEQUENCE
  Synthetic peptide
RPKHPIKHQGLPQEVLNEYQEPVLGPVRGPFP

SEQ ID NO: 367 - protein, 33 aa, ARTIFICIAL SEQUENCE
  Synthetic peptide
RPKHPIKHQGLPQEVLNEYQEPVLGPVRGPFPI

SEQ ID NO: 368 - protein, 33 aa, ARTIFICIAL SEQUENCE
  Synthetic peptide
RPKHPIKHQGLPQEVLNENYQEPVLGPVRGPFP

SEQ ID NO: 369 - protein, 34 aa, ARTIFICIAL SEQUENCE
  Synthetic peptide
RPKHPIKHQGLPQEVLNENYQEPVLGPVRGPFPI

SEQ ID NO: 370 - protein, 34 aa, ARTIFICIAL SEQUENCE
  Synthetic peptide
RPKHPIKHQGLPQEVLNENLYQEPVLGPVRGPFP

SEQ ID NO: 371 - protein, 35 aa, ARTIFICIAL SEQUENCE
  Synthetic peptide
RPKHPIKHQGLPQEVLNENLYQEPVLGPVRGPFPI

SEQ ID NO: 372 - protein, 35 aa, ARTIFICIAL SEQUENCE
  Synthetic peptide
RPKHPIKHQGLPQEVLNENLLYQEPVLGPVRGPFP

SEQ ID NO: 373 - protein, 36 aa, ARTIFICIAL SEQUENCE
  Synthetic peptide
RPKHPIKHQGLPQEVLNENLLYQEPVLGPVRGPFPI

SEQ ID NO: 374 - protein, 36 aa, ARTIFICIAL SEQUENCE
  Synthetic peptide
RPKHPIKHQGLPQEVLNENLLRYQEPVLGPVRGPFP

SEQ ID NO: 375 - protein, 37 aa, ARTIFICIAL SEQUENCE
  Synthetic peptide
RPKHPIKHQGLPQEVLNENLLRYQEPVLGPVRGPFPI

SEQ ID NO: 376 - protein, 37 aa, ARTIFICIAL SEQUENCE
  Synthetic peptide
RPKHPIKHQGLPQEVLNENLLRFYQEPVLGPVRGPFP

SEQ ID NO: 377 - protein, 38 aa, ARTIFICIAL SEQUENCE
  Synthetic peptide
RPKHPIKHQGLPQEVLNENLLRFYQEPVLGPVRGPFPI

SEQ ID NO: 378 - protein, 38 aa, ARTIFICIAL SEQUENCE
  Synthetic peptide
RPKHPIKHQGLPQEVLNENLLRFFYQEPVLGPVRGPFP

SEQ ID NO: 379 - protein, 39 aa, ARTIFICIAL SEQUENCE
  Synthetic peptide
RPKHPIKHQGLPQEVLNENLLRFFYQEPVLGPVRGPFPI

SEQ ID NO: 380 - protein, 39 aa, ARTIFICIAL SEQUENCE
  Synthetic peptide
RPKHPIKHQGLPQEVLNENLLRFFVYQEPVLGPVRGPFP

SEQ ID NO: 381 - protein, 40 aa, ARTIFICIAL SEQUENCE
  Synthetic peptide
RPKHPIKHQGLPQEVLNENLLRFFVYQEPVLGPVRGPFPI

SEQ ID NO: 382 - protein, 40 aa, ARTIFICIAL SEQUENCE
  Synthetic peptide
RPKHPIKHQGLPQEVLNENLLRFFVAYQEPVLGPVRGPFP

SEQ ID NO: 383 - protein, 41 aa, ARTIFICIAL SEQUENCE
  Synthetic peptide
RPKHPIKHQGLPQEVLNENLLRFFVAYQEPVLGPVRGPFPI

SEQ ID NO: 384 - protein, 18 aa, Artificial sequence
  Synthetic peptide
RPYQEPVLGPVRGPFPII

SEQ ID NO: 385 - protein, 19 aa, Artificial sequence
  Synthetic peptide
RPYQEPVLGPVRGPFPIIV

SEQ ID NO: 386 - protein, 19 aa, ARTIFICIAL SEQUENCE
  Synthetic peptide
RPKYQEPVLGPVRGPFPII

SEQ ID NO: 387 - protein, 20 aa, ARTIFICIAL SEQUENCE
  Synthetic peptide
RPKYQEPVLGPVRGPFPIIV

SEQ ID NO: 388 - protein, 20 aa, ARTIFICIAL SEQUENCE
  Synthetic peptide
RPKHYQEPVLGPVRGPFPII

SEQ ID NO: 389 - protein, 21 aa, ARTIFICIAL SEQUENCE
  Synthetic peptide
RPKHYQEPVLGPVRGPFPIIV

SEQ ID NO: 390 - protein, 21 aa, ARTIFICIAL SEQUENCE
  Synthetic peptide
RPKHPYQEPVLGPVRGPFPII

SEQ ID NO: 391 - protein, 22 aa, ARTIFICIAL SEQUENCE
  Synthetic peptide
RPKHPYQEPVLGPVRGPFPIIV

SEQ ID NO: 392 - protein, 22 aa, ARTIFICIAL SEQUENCE
  Synthetic peptide
RPKHPIYQEPVLGPVRGPFPII

SEQ ID NO: 393 - protein, 23 aa, ARTIFICIAL SEQUENCE
  Synthetic peptide
RPKHPIYQEPVLGPVRGPFPIIV

SEQ ID NO: 394 - protein, 23 aa, ARTIFICIAL SEQUENCE
  Synthetic peptide
RPKHPIKYQEPVLGPVRGPFPII

SEQ ID NO: 395 - protein, 24 aa, ARTIFICIAL SEQUENCE
  Synthetic peptide
RPKHPIKYQEPVLGPVRGPFPIIV

SEQ ID NO: 396 - protein, 24 aa, ARTIFICIAL SEQUENCE
  Synthetic peptide
RPKHPIKHYQEPVLGPVRGPFPII

SEQ ID NO: 397 - protein, 25 aa, ARTIFICIAL SEQUENCE
  Synthetic peptide
RPKHPIKHYQEPVLGPVRGPFPIIV

SEQ ID NO: 398 - protein, 25 aa, ARTIFICIAL SEQUENCE
  Synthetic peptide
RPKHPIKHQYQEPVLGPVRGPFPII

SEQ ID NO: 399 - protein, 26 aa, ARTIFICIAL SEQUENCE
  Synthetic peptide
RPKHPIKHQYQEPVLGPVRGPFPIIV

SEQ ID NO: 400 - protein, 26 aa, ARTIFICIAL SEQUENCE
  Synthetic peptide
RPKHPIKHQGYQEPVLGPVRGPFPII

SEQ ID NO: 401 - protein, 27 aa, ARTIFICIAL SEQUENCE
  Synthetic peptide
RPKHPIKHQGYQEPVLGPVRGPFPIIV

SEQ ID NO: 402 - protein, 27 aa, ARTIFICIAL SEQUENCE
  Synthetic peptide
RPKHPIKHQGLYQEPVLGPVRGPFPII

SEQ ID NO: 403 - protein, 28 aa, ARTIFICIAL SEQUENCE
  Synthetic peptide
RPKHPIKHQGLYQEPVLGPVRGPFPIIV

SEQ ID NO: 404 - protein, 28 aa, ARTIFICIAL SEQUENCE
  Synthetic peptide
RPKHPIKHQGLPYQEPVLGPVRGPFPII

SEQ ID NO: 405 - protein, 29 aa, ARTIFICIAL SEQUENCE
  Synthetic peptide
RPKHPIKHQGLPYQEPVLGPVRGPFPIIV

SEQ ID NO: 406 - protein, 29 aa, ARTIFICIAL SEQUENCE
  Synthetic peptide
RPKHPIKHQGLPQYQEPVLGPVRGPFPII

SEQ ID NO: 407 - protein, 30 aa, ARTIFICIAL SEQUENCE
  Synthetic peptide
RPKHPIKHQGLPQYQEPVLGPVRGPFPIIV

SEQ ID NO: 408 - protein, 30 aa, ARTIFICIAL SEQUENCE
  Synthetic peptide
RPKHPIKHQGLPQEYQEPVLGPVRGPFPII

SEQ ID NO: 409 - protein, 31 aa, ARTIFICIAL SEQUENCE
  Synthetic peptide
RPKHPIKHQGLPQEYQEPVLGPVRGPFPIIV

SEQ ID NO: 410 - protein, 31 aa, ARTIFICIAL SEQUENCE
  Synthetic peptide
RPKHPIKHQGLPQEVYQEPVLGPVRGPFPII

SEQ ID NO: 411 - protein, 32 aa, ARTIFICIAL SEQUENCE
  Synthetic peptide
RPKHPIKHQGLPQEVYQEPVLGPVRGPFPIIV

SEQ ID NO: 412 - protein, 32 aa, ARTIFICIAL SEQUENCE
  Synthetic peptide
RPKHPIKHQGLPQEVLYQEPVLGPVRGPFPII

SEQ ID NO: 413 - protein, 33 aa, ARTIFICIAL SEQUENCE
  Synthetic peptide
RPKHPIKHQGLPQEVLYQEPVLGPVRGPFPIIV

SEQ ID NO: 414 - protein, 33 aa, ARTIFICIAL SEQUENCE
  Synthetic peptide
RPKHPIKHQGLPQEVLNYQEPVLGPVRGPFPII

SEQ ID NO: 415 - protein, 34 aa, ARTIFICIAL SEQUENCE
  Synthetic peptide
RPKHPIKHQGLPQEVLNYQEPVLGPVRGPFPIIV

SEQ ID NO: 416 - protein, 34 aa, ARTIFICIAL SEQUENCE
  Synthetic peptide
RPKHPIKHQGLPQEVLNEYQEPVLGPVRGPFPII

SEQ ID NO: 417 - protein, 35 aa, ARTIFICIAL SEQUENCE
  Synthetic peptide
RPKHPIKHQGLPQEVLNEYQEPVLGPVRGPFPIIV

SEQ ID NO: 418 - protein, 35 aa, ARTIFICIAL SEQUENCE
  Synthetic peptide
RPKHPIKHQGLPQEVLNENYQEPVLGPVRGPFPII

SEQ ID NO: 419 - protein, 36 aa, ARTIFICIAL SEQUENCE
  Synthetic peptide
RPKHPIKHQGLPQEVLNENYQEPVLGPVRGPFPIIV

SEQ ID NO: 420 - protein, 36 aa, ARTIFICIAL SEQUENCE
  Synthetic peptide
RPKHPIKHQGLPQEVLNENLYQEPVLGPVRGPFPII

SEQ ID NO: 421 - protein, 37 aa, ARTIFICIAL SEQUENCE
  Synthetic peptide
RPKHPIKHQGLPQEVLNENLYQEPVLGPVRGPFPIIV

SEQ ID NO: 422 - protein, 37 aa, ARTIFICIAL SEQUENCE
  Synthetic peptide
RPKHPIKHQGLPQEVLNENLLYQEPVLGPVRGPFPII

SEQ ID NO: 423 - protein, 38 aa, ARTIFICIAL SEQUENCE
  Synthetic peptide
RPKHPIKHQGLPQEVLNENLLYQEPVLGPVRGPFPIIV

SEQ ID NO: 424 - protein, 38 aa, ARTIFICIAL SEQUENCE
  Synthetic peptide
RPKHPIKHQGLPQEVLNENLLRYQEPVLGPVRGPFPII

SEQ ID NO: 425 - protein, 39 aa, ARTIFICIAL SEQUENCE
  Synthetic peptide
RPKHPIKHQGLPQEVLNENLLRYQEPVLGPVRGPFPIIV

SEQ ID NO: 426 - protein, 39 aa, ARTIFICIAL SEQUENCE
  Synthetic peptide
RPKHPIKHQGLPQEVLNENLLRFYQEPVLGPVRGPFPII

SEQ ID NO: 427 - protein, 40 aa, ARTIFICIAL SEQUENCE
  Synthetic peptide
RPKHPIKHQGLPQEVLNENLLRFYQEPVLGPVRGPFPIIV

SEQ ID NO: 428 - protein, 40 aa, ARTIFICIAL SEQUENCE
  Synthetic peptide
RPKHPIKHQGLPQEVLNENLLRFFYQEPVLGPVRGPFPII

SEQ ID NO: 429 - protein, 41 aa, ARTIFICIAL SEQUENCE
  Synthetic peptide
RPKHPIKHQGLPQEVLNENLLRFFYQEPVLGPVRGPFPIIV

SEQ ID NO: 430 - protein, 41 aa, ARTIFICIAL SEQUENCE
  Synthetic peptide
RPKHPIKHQGLPQEVLNENLLRFFVYQEPVLGPVRGPFPII

SEQ ID NO: 431 - protein, 42 aa, ARTIFICIAL SEQUENCE
  Synthetic peptide
RPKHPIKHQGLPQEVLNENLLRFFVYQEPVLGPVRGPFPIIV

SEQ ID NO: 432 - protein, 42 aa, ARTIFICIAL SEQUENCE
  Synthetic peptide
RPKHPIKHQGLPQEVLNENLLRFFVAYQEPVLGPVRGPFPII

SEQ ID NO: 433 - protein, 43 aa, ARTIFICIAL SEQUENCE
  Synthetic peptide
RPKHPIKHQGLPQEVLNENLLRFFVAYQEPVLGPVRGPFPIIV

SEQ ID NO: 434 - protein, 2 aa, Artificial sequence
  Synthetic peptide
YY

SEQ ID NO: 435 - protein, 2 aa, Artificial sequence
  Synthetic peptide
YV

SEQ ID NO: 436 - protein, 2 aa, Artificial sequence
  Synthetic peptide
VP

SEQ ID NO: 437 - protein, 2 aa, Artificial sequence
  Synthetic peptide
PL

SEQ ID NO: 438 - protein, 2 aa, Artificial sequence
  Synthetic peptide
LG

SEQ ID NO: 439 - protein, 2 aa, Artificial sequence
  Synthetic peptide
GT

SEQ ID NO: 440 - protein, 2 aa, Artificial sequence
  Synthetic peptide
TQ

SEQ ID NO: 441 - protein, 2 aa, Artificial sequence
  Synthetic peptide
QY

SEQ ID NO: 442 - protein, 2 aa, Artificial sequence
  Synthetic peptide
YT

SEQ ID NO: 443 - protein, 2 aa, Artificial sequence
  Synthetic peptide
TD

SEQ ID NO: 444 - protein, 2 aa, Artificial sequence
  Synthetic peptide
DA

SEQ ID NO: 445 - protein, 2 aa, Artificial sequence
  Synthetic peptide
AP

SEQ ID NO: 446 - protein, 2 aa, Artificial sequence
  Synthetic peptide
PS

SEQ ID NO: 447 - protein, 2 aa, Artificial sequence
  Synthetic peptide
SF

SEQ ID NO: 448 - protein, 2 aa, Artificial sequence
  Synthetic peptide
FS

SEQ ID NO: 449 - protein, 2 aa, Artificial sequence
  Synthetic peptide
SD

SEQ ID NO: 450 - protein, 2 aa, Artificial sequence
  Synthetic peptide
DI

SEQ ID NO: 451 - protein, 2 aa, Artificial sequence
  Synthetic peptide
IP

SEQ ID NO: 452 - protein, 2 aa, Artificial sequence
  Synthetic peptide
PN

SEQ ID NO: 453 - protein, 2 aa, Artificial sequence
  Synthetic peptide
NP

SEQ ID NO: 454 - protein, 2 aa, Artificial sequence
  Synthetic peptide
PI

SEQ ID NO: 455 - protein, 2 aa, Artificial sequence
  Synthetic peptide
IG

SEQ ID NO: 456 - protein, 2 aa, Artificial sequence
  Synthetic peptide
GS

SEQ ID NO: 457 - protein, 2 aa, Artificial sequence
  Synthetic peptide
SE

SEQ ID NO: 458 - protein, 2 aa, Artificial sequence
  Synthetic peptide
EN

SEQ ID NO: 459 - protein, 2 aa, Artificial sequence
  Synthetic peptide
NS

SEQ ID NO: 460 - protein, 2 aa, Artificial sequence
  Synthetic peptide
SE

SEQ ID NO: 461 - protein, 2 aa, Artificial sequence
  Synthetic peptide
EK

SEQ ID NO: 462 - protein, 2 aa, Artificial sequence
  Synthetic peptide
KT

SEQ ID NO: 463 - protein, 2 aa, Artificial sequence
  Synthetic peptide
TT

SEQ ID NO: 464 - protein, 2 aa, Artificial sequence
  Synthetic peptide
TM

SEQ ID NO: 465 - protein, 2 aa, Artificial sequence
  Synthetic peptide
MP

SEQ ID NO: 466 - protein, 2 aa, Artificial sequence
  Synthetic peptide
PL

SEQ ID NO: 467 - protein, 2 aa, Artificial sequence
  Synthetic peptide
LW

SEQ ID NO: 468 - protein, 3 aa, Artificial sequence
  Synthetic peptide
YYV

SEQ ID NO: 469 - protein, 3 aa, Artificial sequence
  Synthetic peptide
YVP

SEQ ID NO: 470 - protein, 3 aa, Artificial sequence
  Synthetic peptide
VPL

SEQ ID NO: 471 - protein, 3 aa, Artificial sequence
  Synthetic peptide
PLG

SEQ ID NO: 472 - protein, 3 aa, Artificial sequence
  Synthetic peptide
LGT

SEQ ID NO: 473 - protein, 3 aa, Artificial sequence
  Synthetic peptide
GTQ

SEQ ID NO: 474 - protein, 3 aa, Artificial sequence
  Synthetic peptide
TQY

SEQ ID NO: 475 - protein, 3 aa, Artificial sequence
  Synthetic peptide
QYT

SEQ ID NO: 476 - protein, 3 aa, Artificial sequence
  Synthetic peptide
YTD

SEQ ID NO: 477 - protein, 3 aa, Artificial sequence
  Synthetic peptide
TDA

SEQ ID NO: 478 - protein, 3 aa, Artificial sequence
  Synthetic peptide
DAP

SEQ ID NO: 479 - protein, 3 aa, Artificial sequence
  Synthetic peptide
APS

SEQ ID NO: 480 - protein, 3 aa, Artificial sequence
  Synthetic peptide
PSF

SEQ ID NO: 481 - protein, 3 aa, Artificial sequence
  Synthetic peptide
SFS

SEQ ID NO: 482 - protein, 3 aa, Artificial sequence
  Synthetic peptide
FSD

SEQ ID NO: 483 - protein, 3 aa, Artificial sequence
  Synthetic peptide
SDI

SEQ ID NO: 484 - protein, 3 aa, Artificial sequence
  Synthetic peptide
DIP

SEQ ID NO: 485 - protein, 3 aa, Artificial sequence
  Synthetic peptide
IPN

SEQ ID NO: 486 - protein, 3 aa, Artificial sequence
  Synthetic peptide
PNP

SEQ ID NO: 487 - protein, 3 aa, Artificial sequence
  Synthetic peptide
NPI

SEQ ID NO: 488 - protein, 3 aa, Artificial sequence
  Synthetic peptide
PIG

SEQ ID NO: 489 - protein, 3 aa, Artificial sequence
  Synthetic peptide
IGS

SEQ ID NO: 490 - protein, 3 aa, Artificial sequence
  Synthetic peptide
GSE

SEQ ID NO: 491 - protein, 3 aa, Artificial sequence
  Synthetic peptide
SEN

SEQ ID NO: 492 - protein, 3 aa, Artificial sequence
  Synthetic peptide
ENS

SEQ ID NO: 493 - protein, 3 aa, Artificial sequence
  Synthetic peptide
NSE

SEQ ID NO: 494 - protein, 3 aa, Artificial sequence
  Synthetic peptide
SEK

SEQ ID NO: 495 - protein, 3 aa, Artificial sequence
  Synthetic peptide
EKT

SEQ ID NO: 496 - protein, 3 aa, Artificial sequence
  Synthetic peptide
KTT

SEQ ID NO: 497 - protein, 3 aa, Artificial sequence
  Synthetic peptide
TTM

SEQ ID NO: 498 - protein, 3 aa, Artificial sequence
  Synthetic peptide
TMP

SEQ ID NO: 499 - protein, 3 aa, Artificial sequence
  Synthetic peptide
MPL

SEQ ID NO: 500 - protein, 3 aa, Artificial sequence
  Synthetic peptide
PLW

SEQ ID NO: 501 - protein, 4 aa, Artificial sequence
  Synthetic peptide
YYVP

SEQ ID NO: 502 - protein, 4 aa, Artificial sequence
  Synthetic peptide
YVPL

SEQ ID NO: 503 - protein, 4 aa, Artificial sequence
  Synthetic peptide
VPLG

SEQ ID NO: 504 - protein, 4 aa, Artificial sequence
  Synthetic peptide
PLGT

SEQ ID NO: 505 - protein, 4 aa, Artificial sequence
  Synthetic peptide
LGTQ

SEQ ID NO: 506 - protein, 4 aa, Artificial sequence
  Synthetic peptide
GTQY

SEQ ID NO: 507 - protein, 4 aa, Artificial sequence
  Synthetic peptide
TQYT

SEQ ID NO: 508 - protein, 4 aa, Artificial sequence
  Synthetic peptide
QYTD

SEQ ID NO: 509 - protein, 4 aa, Artificial sequence
  Synthetic peptide
YTDA

SEQ ID NO: 510 - protein, 4 aa, Artificial sequence
  Synthetic peptide
TDAP

SEQ ID NO: 511 - protein, 4 aa, Artificial sequence
  Synthetic peptide
DAPS

SEQ ID NO: 512 - protein, 4 aa, Artificial sequence
  Synthetic peptide
APSF

SEQ ID NO: 513 - protein, 4 aa, Artificial sequence
  Synthetic peptide
PSFS

SEQ ID NO: 514 - protein, 4 aa, Artificial sequence
  Synthetic peptide
SFSD

SEQ ID NO: 515 - protein, 4 aa, Artificial sequence
  Synthetic peptide
FSDI

SEQ ID NO: 516 - protein, 4 aa, Artificial sequence
  Synthetic peptide
SDIP

SEQ ID NO: 517 - protein, 4 aa, Artificial sequence
  Synthetic peptide
DIPN

SEQ ID NO: 518 - protein, 4 aa, Artificial sequence
  Synthetic peptide
IPNP

SEQ ID NO: 519 - protein, 4 aa, Artificial sequence
  Synthetic peptide
PNPI

SEQ ID NO: 520 - protein, 4 aa, Artificial sequence
  Synthetic peptide
NPIG

SEQ ID NO: 521 - protein, 4 aa, Artificial sequence
  Synthetic peptide
PIGS

SEQ ID NO: 522 - protein, 4 aa, Artificial sequence
  Synthetic peptide
IGSE

SEQ ID NO: 523 - protein, 4 aa, Artificial sequence
  Synthetic peptide
GSEN

SEQ ID NO: 524 - protein, 4 aa, Artificial sequence
  Synthetic peptide
SENS

SEQ ID NO: 525 - protein, 4 aa, Artificial sequence
  Synthetic peptide
ENSE

SEQ ID NO: 526 - protein, 4 aa, Artificial sequence
  Synthetic peptide
NSEK

SEQ ID NO: 527 - protein, 4 aa, Artificial sequence
  Synthetic peptide
SEKT

SEQ ID NO: 528 - protein, 4 aa, Artificial sequence
  Synthetic peptide
EKTT

SEQ ID NO: 529 - protein, 4 aa, Artificial sequence
  Synthetic peptide
KTTM

SEQ ID NO: 530 - protein, 4 aa, Artificial sequence
  Synthetic peptide
TTMP

SEQ ID NO: 531 - protein, 4 aa, Artificial sequence
  Synthetic peptide
TMPL

SEQ ID NO: 532 - protein, 4 aa, Artificial sequence
  Synthetic peptide
MPLW

SEQ ID NO: 533 - protein, 5 aa, Artificial sequence
  Synthetic peptide
YYVPL

SEQ ID NO: 534 - protein, 5 aa, Artificial sequence
  Synthetic peptide
YVPLG

SEQ ID NO: 535 - protein, 5 aa, Artificial sequence
  Synthetic peptide
VPLGT

SEQ ID NO: 536 - protein, 5 aa, Artificial sequence
  Synthetic peptide
PLGTQ

SEQ ID NO: 537 - protein, 5 aa, Artificial sequence
  Synthetic peptide
LGTQY

SEQ ID NO: 538 - protein, 5 aa, Artificial sequence
  Synthetic peptide
GTQYT

SEQ ID NO: 539 - protein, 5 aa, Artificial sequence
  Synthetic peptide
TQYTD

SEQ ID NO: 540 - protein, 5 aa, Artificial sequence
  Synthetic peptide
QYTDA

SEQ ID NO: 541 - protein, 5 aa, Artificial sequence
  Synthetic peptide
YTDAP

SEQ ID NO: 542 - protein, 5 aa, Artificial sequence
  Synthetic peptide
TDAPS

SEQ ID NO: 543 - protein, 5 aa, Artificial sequence
  Synthetic peptide
DAPSF

SEQ ID NO: 544 - protein, 5 aa, Artificial sequence
  Synthetic peptide
APSFS

SEQ ID NO: 545 - protein, 5 aa, Artificial sequence
  Synthetic peptide
PSFSD

SEQ ID NO: 546 - protein, 5 aa, Artificial sequence
  Synthetic peptide
SFSDI

SEQ ID NO: 547 - protein, 5 aa, Artificial sequence
  Synthetic peptide
FSDIP

SEQ ID NO: 548 - protein, 5 aa, Artificial sequence
  Synthetic peptide
SDIPN

SEQ ID NO: 549 - protein, 5 aa, Artificial sequence
  Synthetic peptide
DIPNP

SEQ ID NO: 550 - protein, 5 aa, Artificial sequence
  Synthetic peptide
IPNPI

SEQ ID NO: 551 - protein, 5 aa, Artificial sequence
  Synthetic peptide
PNPIG

SEQ ID NO: 552 - protein, 5 aa, Artificial sequence
  Synthetic peptide
NPIGS

SEQ ID NO: 553 - protein, 5 aa, Artificial sequence
  Synthetic peptide
PIGSE

SEQ ID NO: 554 - protein, 5 aa, Artificial sequence
  Synthetic peptide
IGSEN

SEQ ID NO: 555 - protein, 5 aa, Artificial sequence
  Synthetic peptide
GSENS

SEQ ID NO: 556 - protein, 5 aa, Artificial sequence
  Synthetic peptide
SENSE

SEQ ID NO: 557 - protein, 5 aa, Artificial sequence
  Synthetic peptide
ENSEK

SEQ ID NO: 558 - protein, 5 aa, Artificial sequence
  Synthetic peptide
NSEKT

SEQ ID NO: 559 - protein, 5 aa, Artificial sequence
  Synthetic peptide
SEKTT

SEQ ID NO: 560 - protein, 5 aa, Artificial sequence
  Synthetic peptide
EKTTM

SEQ ID NO: 561 - protein, 5 aa, Artificial sequence
  Synthetic peptide
KTTMP

SEQ ID NO: 562 - protein, 5 aa, Artificial sequence
  Synthetic peptide
TTMPL

SEQ ID NO: 563 - protein, 5 aa, Artificial sequence
  Synthetic peptide
TMPLW

SEQ ID NO: 564 - protein, 6 aa, Artificial sequence
  Synthetic peptide
YYVPLG

SEQ ID NO: 565 - protein, 6 aa, Artificial sequence
  Synthetic peptide
YVPLGT

SEQ ID NO: 566 - protein, 6 aa, Artificial sequence
  Synthetic peptide
VPLGTQ

SEQ ID NO: 567 - protein, 6 aa, Artificial sequence
  Synthetic peptide
PLGTQY

SEQ ID NO: 568 - protein, 6 aa, Artificial sequence
  Synthetic peptide
LGTQYT

SEQ ID NO: 569 - protein, 6 aa, Artificial sequence
  Synthetic peptide
GTQYTD

SEQ ID NO: 570 - protein, 6 aa, Artificial sequence
  Synthetic peptide
TQYTDA

SEQ ID NO: 571 - protein, 6 aa, Artificial sequence
  Synthetic peptide
QYTDAP

SEQ ID NO: 572 - protein, 6 aa, Artificial sequence
  Synthetic peptide
YTDAPS

SEQ ID NO: 573 - protein, 6 aa, Artificial sequence
  Synthetic peptide
TDAPSF

SEQ ID NO: 574 - protein, 6 aa, Artificial sequence
  Synthetic peptide
DAPSFS

SEQ ID NO: 575 - protein, 6 aa, Artificial sequence
  Synthetic peptide
APSFSD

SEQ ID NO: 576 - protein, 6 aa, Artificial sequence
  Synthetic peptide
PSFSDI

SEQ ID NO: 577 - protein, 6 aa, Artificial sequence
  Synthetic peptide
SFSDIP

SEQ ID NO: 578 - protein, 6 aa, Artificial sequence
  Synthetic peptide
FSDIPN

SEQ ID NO: 579 - protein, 6 aa, Artificial sequence
  Synthetic peptide
SDIPNP

SEQ ID NO: 580 - protein, 6 aa, Artificial sequence
  Synthetic peptide
DIPNPI

SEQ ID NO: 581 - protein, 6 aa, Artificial sequence
  Synthetic peptide
IPNPIG

SEQ ID NO: 582 - protein, 6 aa, Artificial sequence
  Synthetic peptide
PNPIGS

SEQ ID NO: 583 - protein, 6 aa, Artificial sequence
  Synthetic peptide
NPIGSE

SEQ ID NO: 584 - protein, 6 aa, Artificial sequence
  Synthetic peptide
PIGSEN

SEQ ID NO: 585 - protein, 6 aa, Artificial sequence
  Synthetic peptide
IGSENS

SEQ ID NO: 586 - protein, 6 aa, Artificial sequence
  Synthetic peptide
GSENSE

SEQ ID NO: 587 - protein, 6 aa, Artificial sequence
  Synthetic peptide
SENSEK

SEQ ID NO: 588 - protein, 6 aa, Artificial sequence
  Synthetic peptide
ENSEKT

SEQ ID NO: 589 - protein, 6 aa, Artificial sequence
  Synthetic peptide
NSEKTT

SEQ ID NO: 590 - protein, 6 aa, Artificial sequence
  Synthetic peptide
SEKTTM

SEQ ID NO: 591 - protein, 6 aa, Artificial sequence
  Synthetic peptide
EKTTMP

SEQ ID NO: 592 - protein, 6 aa, Artificial sequence
  Synthetic peptide
KTTMPL

SEQ ID NO: 593 - protein, 6 aa, Artificial sequence
  Synthetic peptide
TTMPLW

SEQ ID NO: 594 - protein, 7 aa, Artificial sequence
  Synthetic peptide
YYVPLGT

SEQ ID NO: 595 - protein, 7 aa, Artificial sequence
  Synthetic peptide
YVPLGTQ

SEQ ID NO: 596 - protein, 7 aa, Artificial sequence
  Synthetic peptide
VPLGTQY

SEQ ID NO: 597 - protein, 7 aa, Artificial sequence
  Synthetic peptide
PLGTQYT

SEQ ID NO: 598 - protein, 7 aa, Artificial sequence
  Synthetic peptide
LGTQYTD

SEQ ID NO: 599 - protein, 7 aa, Artificial sequence
  Synthetic peptide
GTQYTDA

SEQ ID NO: 600 - protein, 7 aa, Artificial sequence
  Synthetic peptide
TQYTDAP

SEQ ID NO: 601 - protein, 7 aa, Artificial sequence
  Synthetic peptide
QYTDAPS

SEQ ID NO: 602 - protein, 7 aa, Artificial sequence
  Synthetic peptide
YTDAPSF

SEQ ID NO: 603 - protein, 7 aa, Artificial sequence
  Synthetic peptide
TDAPSFS

SEQ ID NO: 604 - protein, 7 aa, Artificial sequence
  Synthetic peptide
DAPSFSD

SEQ ID NO: 605 - protein, 7 aa, Artificial sequence
  Synthetic peptide
APSFSDI

SEQ ID NO: 606 - protein, 7 aa, Artificial sequence
  Synthetic peptide
PSFSDIP

SEQ ID NO: 607 - protein, 7 aa, Artificial sequence
  Synthetic peptide
SFSDIPN

SEQ ID NO: 608 - protein, 7 aa, Artificial sequence
  Synthetic peptide
FSDIPNP

SEQ ID NO: 609 - protein, 7 aa, Artificial sequence
  Synthetic peptide
SDIPNPI

SEQ ID NO: 610 - protein, 7 aa, Artificial sequence
  Synthetic peptide
DIPNPIG

SEQ ID NO: 611 - protein, 7 aa, Artificial sequence
  Synthetic peptide
IPNPIGS

SEQ ID NO: 612 - protein, 7 aa, Artificial sequence
  Synthetic peptide
PNPIGSE

SEQ ID NO: 613 - protein, 7 aa, Artificial sequence
  Synthetic peptide
NPIGSEN

SEQ ID NO: 614 - protein, 7 aa, Artificial sequence
  Synthetic peptide
PIGSENS

SEQ ID NO: 615 - protein, 7 aa, Artificial sequence
  Synthetic peptide
IGSENSE

SEQ ID NO: 616 - protein, 7 aa, Artificial sequence
  Synthetic peptide
GSENSEK

SEQ ID NO: 617 - protein, 7 aa, Artificial sequence
  Synthetic peptide
SENSEKT

SEQ ID NO: 618 - protein, 7 aa, Artificial sequence
  Synthetic peptide
ENSEKTT

SEQ ID NO: 619 - protein, 7 aa, Artificial sequence
  Synthetic peptide
NSEKTTM

SEQ ID NO: 620 - protein, 7 aa, Artificial sequence
  Synthetic peptide
SEKTTMP

SEQ ID NO: 621 - protein, 7 aa, Artificial sequence
  Synthetic peptide
EKTTMPL

SEQ ID NO: 622 - protein, 7 aa, Artificial sequence
  Synthetic peptide
KTTMPLW

SEQ ID NO: 623 - protein, 8 aa, Artificial sequence
  Synthetic peptide
YYVPLGTQ

SEQ ID NO: 624 - protein, 8 aa, Artificial sequence
  Synthetic peptide
YVPLGTQY

SEQ ID NO: 625 - protein, 8 aa, Artificial sequence
  Synthetic peptide
VPLGTQYT

SEQ ID NO: 626 - protein, 8 aa, Artificial sequence
  Synthetic peptide
PLGTQYTD

SEQ ID NO: 627 - protein, 8 aa, Artificial sequence
  Synthetic peptide
LGTQYTDA

SEQ ID NO: 628 - protein, 8 aa, Artificial sequence
  Synthetic peptide
GTQYTDAP

SEQ ID NO: 629 - protein, 8 aa, Artificial sequence
  Synthetic peptide
TQYTDAPS

SEQ ID NO: 630 - protein, 8 aa, Artificial sequence
  Synthetic peptide
QYTDAPSF

SEQ ID NO: 631 - protein, 8 aa, Artificial sequence
  Synthetic peptide
YTDAPSFS

SEQ ID NO: 632 - protein, 8 aa, Artificial sequence
  Synthetic peptide
TDAPSFSD

SEQ ID NO: 633 - protein, 8 aa, Artificial sequence
  Synthetic peptide
DAPSFSDI

SEQ ID NO: 634 - protein, 8 aa, Artificial sequence
  Synthetic peptide
APSFSDIP

SEQ ID NO: 635 - protein, 8 aa, Artificial sequence
  Synthetic peptide
PSFSDIPN

SEQ ID NO: 636 - protein, 8 aa, Artificial sequence
  Synthetic peptide
SFSDIPNP

SEQ ID NO: 637 - protein, 8 aa, Artificial sequence
  Synthetic peptide
FSDIPNPI

SEQ ID NO: 638 - protein, 8 aa, Artificial sequence
  Synthetic peptide
SDIPNPIG

SEQ ID NO: 639 - protein, 8 aa, Artificial sequence
  Synthetic peptide
DIPNPIGS

SEQ ID NO: 640 - protein, 8 aa, Artificial sequence
  Synthetic peptide
IPNPIGSE

SEQ ID NO: 641 - protein, 8 aa, Artificial sequence
  Synthetic peptide
PNPIGSEN

SEQ ID NO: 642 - protein, 8 aa, Artificial sequence
  Synthetic peptide
NPIGSENS

SEQ ID NO: 643 - protein, 8 aa, Artificial sequence
  Synthetic peptide
PIGSENSE

SEQ ID NO: 644 - protein, 8 aa, Artificial sequence
  Synthetic peptide
IGSENSEK

SEQ ID NO: 645 - protein, 8 aa, Artificial sequence
  Synthetic peptide
GSENSEKT

SEQ ID NO: 646 - protein, 8 aa, Artificial sequence
  Synthetic peptide
SENSEKTT

SEQ ID NO: 647 - protein, 8 aa, Artificial sequence
  Synthetic peptide
ENSEKTTM

SEQ ID NO: 648 - protein, 8 aa, Artificial sequence
  Synthetic peptide
NSEKTTMP

SEQ ID NO: 649 - protein, 8 aa, Artificial sequence
  Synthetic peptide
SEKTTMPL

SEQ ID NO: 650 - protein, 8 aa, Artificial sequence
  Synthetic peptide
EKTTMPLW

SEQ ID NO: 651 - protein, 9 aa, Artificial sequence
  Synthetic peptide
YYVPLGTQY

SEQ ID NO: 652 - protein, 9 aa, Artificial sequence
  Synthetic peptide
YVPLGTQYT

SEQ ID NO: 653 - protein, 9 aa, Artificial sequence
  Synthetic peptide
VPLGTQYTD

SEQ ID NO: 654 - protein, 9 aa, Artificial sequence
  Synthetic peptide
PLGTQYTDA

SEQ ID NO: 655 - protein, 9 aa, Artificial sequence
  Synthetic peptide
LGTQYTDAP

SEQ ID NO: 656 - protein, 9 aa, Artificial sequence
  Synthetic peptide
GTQYTDAPS

SEQ ID NO: 657 - protein, 9 aa, Artificial sequence
  Synthetic peptide
TQYTDAPSF

SEQ ID NO: 658 - protein, 9 aa, Artificial sequence
  Synthetic peptide
QYTDAPSFS

SEQ ID NO: 659 - protein, 9 aa, Artificial sequence
  Synthetic peptide
YTDAPSFSD

SEQ ID NO: 660 - protein, 9 aa, Artificial sequence
  Synthetic peptide
TDAPSFSDI

SEQ ID NO: 661 - protein, 9 aa, Artificial sequence
  Synthetic peptide
DAPSFSDIP

SEQ ID NO: 662 - protein, 9 aa, Artificial sequence
  Synthetic peptide
APSFSDIPN

SEQ ID NO: 663 - protein, 9 aa, Artificial sequence
  Synthetic peptide
PSFSDIPNP

SEQ ID NO: 664 - protein, 9 aa, Artificial sequence
  Synthetic peptide
SFSDIPNPI

SEQ ID NO: 665 - protein, 9 aa, Artificial sequence
  Synthetic peptide
FSDIPNPIG

SEQ ID NO: 666 - protein, 9 aa, Artificial sequence
  Synthetic peptide
SDIPNPIGS

SEQ ID NO: 667 - protein, 9 aa, Artificial sequence
  Synthetic peptide
DIPNPIGSE

SEQ ID NO: 668 - protein, 9 aa, Artificial sequence
  Synthetic peptide
IPNPIGSEN

SEQ ID NO: 669 - protein, 9 aa, Artificial sequence
  Synthetic peptide
PNPIGSENS

SEQ ID NO: 670 - protein, 9 aa, Artificial sequence
  Synthetic peptide
NPIGSENSE

SEQ ID NO: 671 - protein, 9 aa, Artificial sequence
  Synthetic peptide
PIGSENSEK

SEQ ID NO: 672 - protein, 9 aa, Artificial sequence
  Synthetic peptide
IGSENSEKT

SEQ ID NO: 673 - protein, 9 aa, Artificial sequence
  Synthetic peptide
GSENSEKTT

SEQ ID NO: 674 - protein, 9 aa, Artificial sequence
  Synthetic peptide
SENSEKTTM

SEQ ID NO: 675 - protein, 9 aa, Artificial sequence
  Synthetic peptide
ENSEKTTMP

SEQ ID NO: 676 - protein, 9 aa, Artificial sequence
  Synthetic peptide
NSEKTTMPL

SEQ ID NO: 677 - protein, 9 aa, Artificial sequence
  Synthetic peptide
SEKTTMPLW

SEQ ID NO: 678 - protein, 10 aa, Artificial sequence
  Synthetic peptide
YYVPLGTQYT

SEQ ID NO: 679 - protein, 10 aa, Artificial sequence
  Synthetic peptide
YVPLGTQYTD

SEQ ID NO: 680 - protein, 10 aa, Artificial sequence
  Synthetic peptide
VPLGTQYTDA

SEQ ID NO: 681 - protein, 10 aa, Artificial sequence
  Synthetic peptide
PLGTQYTDAP

SEQ ID NO: 682 - protein, 10 aa, Artificial sequence
  Synthetic peptide
LGTQYTDAPS

SEQ ID NO: 683 - protein, 10 aa, Artificial sequence
  Synthetic peptide
GTQYTDAPSF

SEQ ID NO: 684 - protein, 10 aa, Artificial sequence
  Synthetic peptide
TQYTDAPSFS

SEQ ID NO: 685 - protein, 10 aa, Artificial sequence
  Synthetic peptide
QYTDAPSFSD

SEQ ID NO: 686 - protein, 10 aa, Artificial sequence
  Synthetic peptide
YTDAPSFSDI

SEQ ID NO: 687 - protein, 10 aa, Artificial sequence
  Synthetic peptide
TDAPSFSDIP

SEQ ID NO: 688 - protein, 10 aa, Artificial sequence
  Synthetic peptide
DAPSFSDIPN

SEQ ID NO: 689 - protein, 10 aa, Artificial sequence
  Synthetic peptide
APSFSDIPNP

SEQ ID NO: 690 - protein, 10 aa, Artificial sequence
  Synthetic peptide
PSFSDIPNPI

SEQ ID NO: 691 - protein, 10 aa, Artificial sequence
  Synthetic peptide
SFSDIPNPIG

SEQ ID NO: 692 - protein, 10 aa, Artificial sequence
  Synthetic peptide
FSDIPNPIGS

SEQ ID NO: 693 - protein, 10 aa, Artificial sequence
  Synthetic peptide
SDIPNPIGSE

SEQ ID NO: 694 - protein, 10 aa, Artificial sequence
  Synthetic peptide
DIPNPIGSEN

SEQ ID NO: 695 - protein, 10 aa, Artificial sequence
  Synthetic peptide
IPNPIGSENS

SEQ ID NO: 696 - protein, 10 aa, Artificial sequence
  Synthetic peptide
PNPIGSENSE

SEQ ID NO: 697 - protein, 10 aa, Artificial sequence
  Synthetic peptide
NPIGSENSEK

SEQ ID NO: 698 - protein, 10 aa, Artificial sequence
  Synthetic peptide
PIGSENSEKT

SEQ ID NO: 699 - protein, 10 aa, Artificial sequence
  Synthetic peptide
IGSENSEKTT

SEQ ID NO: 700 - protein, 10 aa, Artificial sequence
  Synthetic peptide
GSENSEKTTM

SEQ ID NO: 701 - protein, 10 aa, Artificial sequence
  Synthetic peptide
SENSEKTTMP

SEQ ID NO: 702 - protein, 10 aa, Artificial sequence
  Synthetic peptide
ENSEKTTMPL

SEQ ID NO: 703 - protein, 10 aa, Artificial sequence
  Synthetic peptide
NSEKTTMPLW

SEQ ID NO: 704 - protein, 11 aa, Artificial sequence
  Synthetic peptide
YYVPLGTQYTD

SEQ ID NO: 705 - protein, 11 aa, Artificial sequence
  Synthetic peptide
YVPLGTQYTDA

SEQ ID NO: 706 - protein, 11 aa, Artificial sequence
  Synthetic peptide
VPLGTQYTDAP

SEQ ID NO: 707 - protein, 11 aa, Artificial sequence
  Synthetic peptide
PLGTQYTDAPS

SEQ ID NO: 708 - protein, 11 aa, Artificial sequence
  Synthetic peptide
LGTQYTDAPSF

SEQ ID NO: 709 - protein, 11 aa, Artificial sequence
  Synthetic peptide
GTQYTDAPSFS

SEQ ID NO: 710 - protein, 11 aa, Artificial sequence
  Synthetic peptide
TQYTDAPSFSD

SEQ ID NO: 711 - protein, 11 aa, Artificial sequence
  Synthetic peptide
QYTDAPSFSDI

SEQ ID NO: 712 - protein, 11 aa, Artificial sequence
  Synthetic peptide
YTDAPSFSDIP

SEQ ID NO: 713 - protein, 11 aa, Artificial sequence
  Synthetic peptide
TDAPSFSDIPN

SEQ ID NO: 714 - protein, 11 aa, Artificial sequence
  Synthetic peptide
DAPSFSDIPNP

SEQ ID NO: 715 - protein, 11 aa, Artificial sequence
  Synthetic peptide
APSFSDIPNPI

SEQ ID NO: 716 - protein, 11 aa, Artificial sequence
  Synthetic peptide
PSFSDIPNPIG

SEQ ID NO: 717 - protein, 11 aa, Artificial sequence
  Synthetic peptide
SFSDIPNPIGS

SEQ ID NO: 718 - protein, 11 aa, Artificial sequence
  Synthetic peptide
FSDIPNPIGSE

SEQ ID NO: 719 - protein, 11 aa, Artificial sequence
  Synthetic peptide
SDIPNPIGSEN

SEQ ID NO: 720 - protein, 11 aa, Artificial sequence
  Synthetic peptide
DIPNPIGSENS

SEQ ID NO: 721 - protein, 11 aa, Artificial sequence
  Synthetic peptide
IPNPIGSENSE

SEQ ID NO: 722 - protein, 11 aa, Artificial sequence
  Synthetic peptide
PNPIGSENSEK

SEQ ID NO: 723 - protein, 11 aa, Artificial sequence
  Synthetic peptide
NPIGSENSEKT

SEQ ID NO: 724 - protein, 11 aa, Artificial sequence
  Synthetic peptide
PIGSENSEKTT

SEQ ID NO: 725 - protein, 11 aa, Artificial sequence
  Synthetic peptide
IGSENSEKTTM

SEQ ID NO: 726 - protein, 11 aa, Artificial sequence
  Synthetic peptide
GSENSEKTTMP

SEQ ID NO: 727 - protein, 11 aa, Artificial sequence
  Synthetic peptide
SENSEKTTMPL

SEQ ID NO: 728 - protein, 11 aa, Artificial sequence
  Synthetic peptide
ENSEKTTMPLW

SEQ ID NO: 729 - protein, 12 aa, Artificial sequence
  Synthetic peptide
YYVPLGTQYTDA

SEQ ID NO: 730 - protein, 12 aa, Artificial sequence
  Synthetic peptide
YVPLGTQYTDAP

SEQ ID NO: 731 - protein, 12 aa, Artificial sequence
  Synthetic peptide
VPLGTQYTDAPS

SEQ ID NO: 732 - protein, 12 aa, Artificial sequence
  Synthetic peptide
PLGTQYTDAPSF

SEQ ID NO: 733 - protein, 12 aa, Artificial sequence
  Synthetic peptide
LGTQYTDAPSFS

SEQ ID NO: 734 - protein, 12 aa, Artificial sequence
  Synthetic peptide
GTQYTDAPSFSD

SEQ ID NO: 735 - protein, 12 aa, Artificial sequence
  Synthetic peptide
TQYTDAPSFSDI

SEQ ID NO: 736 - protein, 12 aa, Artificial sequence
  Synthetic peptide
QYTDAPSFSDIP

SEQ ID NO: 737 - protein, 12 aa, Artificial sequence
  Synthetic peptide
YTDAPSFSDIPN

SEQ ID NO: 738 - protein, 12 aa, Artificial sequence
  Synthetic peptide
TDAPSFSDIPNP

SEQ ID NO: 739 - protein, 12 aa, Artificial sequence
  Synthetic peptide
DAPSFSDIPNPI

SEQ ID NO: 740 - protein, 12 aa, Artificial sequence
  Synthetic peptide
APSFSDIPNPIG

SEQ ID NO: 741 - protein, 12 aa, Artificial sequence
  Synthetic peptide
PSFSDIPNPIGS

SEQ ID NO: 742 - protein, 12 aa, Artificial sequence
  Synthetic peptide
SFSDIPNPIGSE

SEQ ID NO: 743 - protein, 12 aa, Artificial sequence
  Synthetic peptide
FSDIPNPIGSEN

SEQ ID NO: 744 - protein, 12 aa, Artificial sequence
  Synthetic peptide
SDIPNPIGSENS

SEQ ID NO: 745 - protein, 12 aa, Artificial sequence
  Synthetic peptide
DIPNPIGSENSE

SEQ ID NO: 746 - protein, 12 aa, Artificial sequence
  Synthetic peptide
IPNPIGSENSEK

SEQ ID NO: 747 - protein, 12 aa, Artificial sequence
  Synthetic peptide
PNPIGSENSEKT

SEQ ID NO: 748 - protein, 12 aa, Artificial sequence
  Synthetic peptide
NPIGSENSEKTT

SEQ ID NO: 749 - protein, 12 aa, Artificial sequence
  Synthetic peptide
PIGSENSEKTTM

SEQ ID NO: 750 - protein, 12 aa, Artificial sequence
  Synthetic peptide
IGSENSEKTTMP

SEQ ID NO: 751 - protein, 12 aa, Artificial sequence
  Synthetic peptide
GSENSEKTTMPL

SEQ ID NO: 752 - protein, 12 aa, Artificial sequence
  Synthetic peptide
SENSEKTTMPLW

SEQ ID NO: 753 - protein, 13 aa, Artificial sequence
  Synthetic peptide
YYVPLGTQYTDAP

SEQ ID NO: 754 - protein, 13 aa, Artificial sequence
  Synthetic peptide
YVPLGTQYTDAPS

SEQ ID NO: 755 - protein, 13 aa, Artificial sequence
  Synthetic peptide
VPLGTQYTDAPSF

SEQ ID NO: 756 - protein, 13 aa, Artificial sequence
  Synthetic peptide
PLGTQYTDAPSFS

SEQ ID NO: 757 - protein, 13 aa, Artificial sequence
  Synthetic peptide
LGTQYTDAPSFSD

SEQ ID NO: 758 - protein, 13 aa, Artificial sequence
  Synthetic peptide
GTQYTDAPSFSDI

SEQ ID NO: 759 - protein, 13 aa, Artificial sequence
  Synthetic peptide
TQYTDAPSFSDIP

SEQ ID NO: 760 - protein, 13 aa, Artificial sequence
  Synthetic peptide
QYTDAPSFSDIPN

SEQ ID NO: 761 - protein, 13 aa, Artificial sequence
  Synthetic peptide
YTDAPSFSDIPNP

SEQ ID NO: 762 - protein, 13 aa, Artificial sequence
  Synthetic peptide
TDAPSFSDIPNPI

SEQ ID NO: 763 - protein, 13 aa, Artificial sequence
  Synthetic peptide
DAPSFSDIPNPIG

SEQ ID NO: 764 - protein, 13 aa, Artificial sequence
  Synthetic peptide
APSFSDIPNPIGS

SEQ ID NO: 765 - protein, 13 aa, Artificial sequence
  Synthetic peptide
PSFSDIPNPIGSE

SEQ ID NO: 766 - protein, 13 aa, Artificial sequence
  Synthetic peptide
SFSDIPNPIGSEN

SEQ ID NO: 767 - protein, 13 aa, Artificial sequence
  Synthetic peptide
FSDIPNPIGSENS

SEQ ID NO: 768 - protein, 13 aa, Artificial sequence
  Synthetic peptide
SDIPNPIGSENSE

SEQ ID NO: 769 - protein, 13 aa, Artificial sequence
  Synthetic peptide
DIPNPIGSENSEK

SEQ ID NO: 770 - protein, 13 aa, Artificial sequence
  Synthetic peptide
IPNPIGSENSEKT

SEQ ID NO: 771 - protein, 13 aa, Artificial sequence
  Synthetic peptide
PNPIGSENSEKTT

SEQ ID NO: 772 - protein, 13 aa, Artificial sequence
  Synthetic peptide
NPIGSENSEKTTM

SEQ ID NO: 773 - protein, 13 aa, Artificial sequence
  Synthetic peptide
PIGSENSEKTTMP

SEQ ID NO: 774 - protein, 13 aa, Artificial sequence
  Synthetic peptide
IGSENSEKTTMPL

SEQ ID NO: 775 - protein, 13 aa, Artificial sequence
  Synthetic peptide
GSENSEKTTMPLW

SEQ ID NO: 776 - protein, 14 aa, Artificial sequence
  Synthetic peptide
YYVPLGTQYTDAPS

SEQ ID NO: 777 - protein, 14 aa, Artificial sequence
  Synthetic peptide
YVPLGTQYTDAPSF

SEQ ID NO: 778 - protein, 14 aa, Artificial sequence
  Synthetic peptide
VPLGTQYTDAPSFS

SEQ ID NO: 779 - protein, 14 aa, Artificial sequence
  Synthetic peptide
PLGTQYTDAPSFSD

SEQ ID NO: 780 - protein, 14 aa, Artificial sequence
  Synthetic peptide
LGTQYTDAPSFSDI

SEQ ID NO: 781 - protein, 14 aa, Artificial sequence
  Synthetic peptide
GTQYTDAPSFSDIP

SEQ ID NO: 782 - protein, 14 aa, Artificial sequence
  Synthetic peptide
TQYTDAPSFSDIPN

SEQ ID NO: 783 - protein, 14 aa, Artificial sequence
  Synthetic peptide
QYTDAPSFSDIPNP

SEQ ID NO: 784 - protein, 14 aa, Artificial sequence
  Synthetic peptide
YTDAPSFSDIPNPI

SEQ ID NO: 785 - protein, 14 aa, Artificial sequence
  Synthetic peptide
TDAPSFSDIPNPIG

SEQ ID NO: 786 - protein, 14 aa, Artificial sequence
  Synthetic peptide
DAPSFSDIPNPIGS

SEQ ID NO: 787 - protein, 14 aa, Artificial sequence
  Synthetic peptide
APSFSDIPNPIGSE

SEQ ID NO: 788 - protein, 14 aa, Artificial sequence
  Synthetic peptide
PSFSDIPNPIGSEN

SEQ ID NO: 789 - protein, 14 aa, Artificial sequence
  Synthetic peptide
SFSDIPNPIGSENS

SEQ ID NO: 790 - protein, 14 aa, Artificial sequence
  Synthetic peptide
FSDIPNPIGSENSE

SEQ ID NO: 791 - protein, 14 aa, Artificial sequence
  Synthetic peptide
SDIPNPIGSENSEK

SEQ ID NO: 792 - protein, 14 aa, Artificial sequence
  Synthetic peptide
DIPNPIGSENSEKT

SEQ ID NO: 793 - protein, 14 aa, Artificial sequence
  Synthetic peptide
IPNPIGSENSEKTT

SEQ ID NO: 794 - protein, 14 aa, Artificial sequence
  Synthetic peptide
PNPIGSENSEKTTM

SEQ ID NO: 795 - protein, 14 aa, Artificial sequence
  Synthetic peptide
NPIGSENSEKTTMP

SEQ ID NO: 796 - protein, 14 aa, Artificial sequence
  Synthetic peptide
PIGSENSEKTTMPL

SEQ ID NO: 797 - protein, 14 aa, Artificial sequence
  Synthetic peptide
IGSENSEKTTMPLW

SEQ ID NO: 798 - protein, 15 aa, Artificial sequence
  Synthetic peptide
YYVPLGTQYTDAPSF

SEQ ID NO: 799 - protein, 15 aa, Artificial sequence
  Synthetic peptide
YVPLGTQYTDAPSFS

SEQ ID NO: 800 - protein, 15 aa, Artificial sequence
  Synthetic peptide
VPLGTQYTDAPSFSD

SEQ ID NO: 801 - protein, 15 aa, Artificial sequence
  Synthetic peptide
PLGTQYTDAPSFSDI

SEQ ID NO: 802 - protein, 15 aa, Artificial sequence
  Synthetic peptide
LGTQYTDAPSFSDIP

SEQ ID NO: 803 - protein, 15 aa, Artificial sequence
  Synthetic peptide
GTQYTDAPSFSDIPN

SEQ ID NO: 804 - protein, 15 aa, Artificial sequence
  Synthetic peptide
TQYTDAPSFSDIPNP

SEQ ID NO: 805 - protein, 15 aa, Artificial sequence
  Synthetic peptide
QYTDAPSFSDIPNPI

SEQ ID NO: 806 - protein, 15 aa, Artificial sequence
  Synthetic peptide
YTDAPSFSDIPNPIG

SEQ ID NO: 807 - protein, 15 aa, Artificial sequence
  Synthetic peptide
TDAPSFSDIPNPIGS

SEQ ID NO: 808 - protein, 15 aa, Artificial sequence
  Synthetic peptide
DAPSFSDIPNPIGSE

SEQ ID NO: 809 - protein, 15 aa, Artificial sequence
  Synthetic peptide
APSFSDIPNPIGSEN

SEQ ID NO: 810 - protein, 15 aa, Artificial sequence
  Synthetic peptide
PSFSDIPNPIGSENS

SEQ ID NO: 811 - protein, 15 aa, Artificial sequence
  Synthetic peptide
SFSDIPNPIGSENSE

SEQ ID NO: 812 - protein, 15 aa, Artificial sequence
  Synthetic peptide
FSDIPNPIGSENSEK

SEQ ID NO: 813 - protein, 15 aa, Artificial sequence
  Synthetic peptide
SDIPNPIGSENSEKT

SEQ ID NO: 814 - protein, 15 aa, Artificial sequence
  Synthetic peptide
DIPNPIGSENSEKTT

SEQ ID NO: 815 - protein, 15 aa, Artificial sequence
  Synthetic peptide
IPNPIGSENSEKTTM

SEQ ID NO: 816 - protein, 15 aa, Artificial sequence
  Synthetic peptide
PNPIGSENSEKTTMP

SEQ ID NO: 817 - protein, 15 aa, Artificial sequence
  Synthetic peptide
NPIGSENSEKTTMPL

SEQ ID NO: 818 - protein, 15 aa, Artificial sequence
  Synthetic peptide
PIGSENSEKTTMPLW

SEQ ID NO: 819 - protein, 16 aa, Artificial sequence
  Synthetic peptide
YYVPLGTQYTDAPSFS

SEQ ID NO: 820 - protein, 16 aa, Artificial sequence
  Synthetic peptide
YVPLGTQYTDAPSFSD

SEQ ID NO: 821 - protein, 16 aa, Artificial sequence
  Synthetic peptide
VPLGTQYTDAPSFSDI

SEQ ID NO: 822 - protein, 16 aa, Artificial sequence
  Synthetic peptide
PLGTQYTDAPSFSDIP

SEQ ID NO: 823 - protein, 16 aa, Artificial sequence
  Synthetic peptide
LGTQYTDAPSFSDIPN

SEQ ID NO: 824 - protein, 16 aa, Artificial sequence
  Synthetic peptide
GTQYTDAPSFSDIPNP

SEQ ID NO: 825 - protein, 16 aa, Artificial sequence
  Synthetic peptide
TQYTDAPSFSDIPNPI

SEQ ID NO: 826 - protein, 16 aa, Artificial sequence
  Synthetic peptide
QYTDAPSFSDIPNPIG

SEQ ID NO: 827 - protein, 16 aa, Artificial sequence
  Synthetic peptide
YTDAPSFSDIPNPIGS

SEQ ID NO: 828 - protein, 16 aa, Artificial sequence
  Synthetic peptide
TDAPSFSDIPNPIGSE

SEQ ID NO: 829 - protein, 16 aa, Artificial sequence
  Synthetic peptide
DAPSFSDIPNPIGSEN

SEQ ID NO: 830 - protein, 16 aa, Artificial sequence
  Synthetic peptide
APSFSDIPNPIGSENS

SEQ ID NO: 831 - protein, 16 aa, Artificial sequence
  Synthetic peptide
PSFSDIPNPIGSENSE

SEQ ID NO: 832 - protein, 16 aa, Artificial sequence
  Synthetic peptide
SFSDIPNPIGSENSEK

SEQ ID NO: 833 - protein, 16 aa, Artificial sequence
  Synthetic peptide
FSDIPNPIGSENSEKT

SEQ ID NO: 834 - protein, 16 aa, Artificial sequence
  Synthetic peptide
SDIPNPIGSENSEKTT

SEQ ID NO: 835 - protein, 16 aa, Artificial sequence
  Synthetic peptide
DIPNPIGSENSEKTTM

SEQ ID NO: 836 - protein, 16 aa, Artificial sequence
  Synthetic peptide
IPNPIGSENSEKTTMP

SEQ ID NO: 837 - protein, 16 aa, Artificial sequence
  Synthetic peptide
PNPIGSENSEKTTMPL

SEQ ID NO: 838 - protein, 16 aa, Artificial sequence
  Synthetic peptide
NPIGSENSEKTTMPLW

SEQ ID NO: 839 - protein, 17 aa, Artificial sequence
  Synthetic peptide
YYVPLGTQYTDAPSFSD

SEQ ID NO: 840 - protein, 17 aa, Artificial sequence
  Synthetic peptide
YVPLGTQYTDAPSFSDI

SEQ ID NO: 841 - protein, 17 aa, Artificial sequence
  Synthetic peptide
VPLGTQYTDAPSFSDIP

SEQ ID NO: 842 - protein, 17 aa, Artificial sequence
  Synthetic peptide
PLGTQYTDAPSFSDIPN

SEQ ID NO: 843 - protein, 17 aa, Artificial sequence
  Synthetic peptide
LGTQYTDAPSFSDIPNP

SEQ ID NO: 844 - protein, 17 aa, Artificial sequence
  Synthetic peptide
GTQYTDAPSFSDIPNPI

SEQ ID NO: 845 - protein, 17 aa, Artificial sequence
  Synthetic peptide
TQYTDAPSFSDIPNPIG

SEQ ID NO: 846 - protein, 17 aa, Artificial sequence
  Synthetic peptide
QYTDAPSFSDIPNPIGS

SEQ ID NO: 847 - protein, 17 aa, Artificial sequence
  Synthetic peptide
YTDAPSFSDIPNPIGSE

SEQ ID NO: 848 - protein, 17 aa, Artificial sequence
  Synthetic peptide
TDAPSFSDIPNPIGSEN

SEQ ID NO: 849 - protein, 17 aa, Artificial sequence
  Synthetic peptide
DAPSFSDIPNPIGSENS

SEQ ID NO: 850 - protein, 17 aa, Artificial sequence
  Synthetic peptide
APSFSDIPNPIGSENSE

SEQ ID NO: 851 - protein, 17 aa, Artificial sequence
  Synthetic peptide
PSFSDIPNPIGSENSEK

SEQ ID NO: 852 - protein, 17 aa, Artificial sequence
  Synthetic peptide
SFSDIPNPIGSENSEKT

SEQ ID NO: 853 - protein, 17 aa, Artificial sequence
  Synthetic peptide
FSDIPNPIGSENSEKTT

SEQ ID NO: 854 - protein, 17 aa, Artificial sequence
  Synthetic peptide
SDIPNPIGSENSEKTTM

SEQ ID NO: 855 - protein, 17 aa, Artificial sequence
  Synthetic peptide
DIPNPIGSENSEKTTMP

SEQ ID NO: 856 - protein, 17 aa, Artificial sequence
  Synthetic peptide
IPNPIGSENSEKTTMPL

SEQ ID NO: 857 - protein, 17 aa, Artificial sequence
  Synthetic peptide
PNPIGSENSEKTTMPLW

SEQ ID NO: 858 - protein, 18 aa, Artificial sequence
  Synthetic peptide
YYVPLGTQYTDAPSFSDI

SEQ ID NO: 859 - protein, 18 aa, Artificial sequence
  Synthetic peptide
YVPLGTQYTDAPSFSDIP

SEQ ID NO: 860 - protein, 18 aa, Artificial sequence
  Synthetic peptide
VPLGTQYTDAPSFSDIPN

SEQ ID NO: 861 - protein, 18 aa, Artificial sequence
  Synthetic peptide
PLGTQYTDAPSFSDIPNP

SEQ ID NO: 862 - protein, 18 aa, Artificial sequence
  Synthetic peptide
LGTQYTDAPSFSDIPNPI

SEQ ID NO: 863 - protein, 18 aa, Artificial sequence
  Synthetic peptide
GTQYTDAPSFSDIPNPIG

SEQ ID NO: 864 - protein, 18 aa, Artificial sequence
  Synthetic peptide
TQYTDAPSFSDIPNPIGS

SEQ ID NO: 865 - protein, 18 aa, Artificial sequence
  Synthetic peptide
QYTDAPSFSDIPNPIGSE

SEQ ID NO: 866 - protein, 18 aa, Artificial sequence
  Synthetic peptide
YTDAPSFSDIPNPIGSEN

SEQ ID NO: 867 - protein, 18 aa, Artificial sequence
  Synthetic peptide
TDAPSFSDIPNPIGSENS

SEQ ID NO: 868 - protein, 18 aa, Artificial sequence
  Synthetic peptide
DAPSFSDIPNPIGSENSE

SEQ ID NO: 869 - protein, 18 aa, Artificial sequence
  Synthetic peptide
APSFSDIPNPIGSENSEK

SEQ ID NO: 870 - protein, 18 aa, Artificial sequence
  Synthetic peptide
PSFSDIPNPIGSENSEKT

SEQ ID NO: 871 - protein, 18 aa, Artificial sequence
  Synthetic peptide
SFSDIPNPIGSENSEKTT

SEQ ID NO: 872 - protein, 18 aa, Artificial sequence
  Synthetic peptide
FSDIPNPIGSENSEKTTM

SEQ ID NO: 873 - protein, 18 aa, Artificial sequence
  Synthetic peptide
SDIPNPIGSENSEKTTMP

SEQ ID NO: 874 - protein, 18 aa, Artificial sequence
  Synthetic peptide
DIPNPIGSENSEKTTMPL

SEQ ID NO: 875 - protein, 18 aa, Artificial sequence
  Synthetic peptide
IPNPIGSENSEKTTMPLW

SEQ ID NO: 876 - protein, 19 aa, Artificial sequence
  Synthetic peptide
YYVPLGTQYTDAPSFSDIP

SEQ ID NO: 877 - protein, 19 aa, Artificial sequence
  Synthetic peptide
YVPLGTQYTDAPSFSDIPN

SEQ ID NO: 878 - protein, 19 aa, Artificial sequence
  Synthetic peptide
VPLGTQYTDAPSFSDIPNP

SEQ ID NO: 879 - protein, 19 aa, Artificial sequence
  Synthetic peptide
PLGTQYTDAPSFSDIPNPI

SEQ ID NO: 880 - protein, 19 aa, Artificial sequence
  Synthetic peptide
LGTQYTDAPSFSDIPNPIG

SEQ ID NO: 881 - protein, 19 aa, Artificial sequence
  Synthetic peptide
GTQYTDAPSFSDIPNPIGS

SEQ ID NO: 882 - protein, 19 aa, Artificial sequence
  Synthetic peptide
TQYTDAPSFSDIPNPIGSE

SEQ ID NO: 883 - protein, 19 aa, Artificial sequence
  Synthetic peptide
QYTDAPSFSDIPNPIGSEN

SEQ ID NO: 884 - protein, 19 aa, Artificial sequence
  Synthetic peptide
YTDAPSFSDIPNPIGSENS

SEQ ID NO: 885 - protein, 19 aa, Artificial sequence
  Synthetic peptide
TDAPSFSDIPNPIGSENSE

SEQ ID NO: 886 - protein, 19 aa, Artificial sequence
  Synthetic peptide
DAPSFSDIPNPIGSENSEK

SEQ ID NO: 887 - protein, 19 aa, Artificial sequence
  Synthetic peptide
APSFSDIPNPIGSENSEKT

SEQ ID NO: 888 - protein, 19 aa, Artificial sequence
  Synthetic peptide
PSFSDIPNPIGSENSEKTT

SEQ ID NO: 889 - protein, 19 aa, Artificial sequence
  Synthetic peptide
SFSDIPNPIGSENSEKTTM

SEQ ID NO: 890 - protein, 19 aa, Artificial sequence
  Synthetic peptide
FSDIPNPIGSENSEKTTMP

SEQ ID NO: 891 - protein, 19 aa, Artificial sequence
  Synthetic peptide
SDIPNPIGSENSEKTTMPL

SEQ ID NO: 892 - protein, 19 aa, Artificial sequence
  Synthetic peptide
DIPNPIGSENSEKTTMPLW

SEQ ID NO: 893 - protein, 20 aa, Artificial sequence
  Synthetic peptide
YYVPLGTQYTDAPSFSDIPN

SEQ ID NO: 894 - protein, 20 aa, Artificial sequence
  Synthetic peptide
YVPLGTQYTDAPSFSDIPNP

SEQ ID NO: 895 - protein, 20 aa, Artificial sequence
  Synthetic peptide
VPLGTQYTDAPSFSDIPNPI

SEQ ID NO: 896 - protein, 20 aa, Artificial sequence
  Synthetic peptide
PLGTQYTDAPSFSDIPNPIG

SEQ ID NO: 897 - protein, 20 aa, Artificial sequence
  Synthetic peptide
LGTQYTDAPSFSDIPNPIGS

SEQ ID NO: 898 - protein, 20 aa, Artificial sequence
  Synthetic peptide
GTQYTDAPSFSDIPNPIGSE

SEQ ID NO: 899 - protein, 20 aa, Artificial sequence
  Synthetic peptide
TQYTDAPSFSDIPNPIGSEN

SEQ ID NO: 900 - protein, 20 aa, Artificial sequence
  Synthetic peptide
QYTDAPSFSDIPNPIGSENS

SEQ ID NO: 901 - protein, 20 aa, Artificial sequence
  Synthetic peptide
YTDAPSFSDIPNPIGSENSE

SEQ ID NO: 902 - protein, 20 aa, Artificial sequence
  Synthetic peptide
TDAPSFSDIPNPIGSENSEK

SEQ ID NO: 903 - protein, 20 aa, Artificial sequence
  Synthetic peptide
DAPSFSDIPNPIGSENSEKT

SEQ ID NO: 904 - protein, 20 aa, Artificial sequence
  Synthetic peptide
APSFSDIPNPIGSENSEKTT

SEQ ID NO: 905 - protein, 20 aa, Artificial sequence
  Synthetic peptide
PSFSDIPNPIGSENSEKTTM

SEQ ID NO: 906 - protein, 20 aa, Artificial sequence
  Synthetic peptide
SFSDIPNPIGSENSEKTTMP

SEQ ID NO: 907 - protein, 20 aa, Artificial sequence
  Synthetic peptide
FSDIPNPIGSENSEKTTMPL

SEQ ID NO: 908 - protein, 20 aa, Artificial sequence
  Synthetic peptide
SDIPNPIGSENSEKTTMPLW

SEQ ID NO: 909 - protein, 21 aa, Artificial sequence
  Synthetic peptide
YYVPLGTQYTDAPSFSDIPNP

SEQ ID NO: 910 - protein, 21 aa, Artificial sequence
  Synthetic peptide
YVPLGTQYTDAPSFSDIPNPI

SEQ ID NO: 911 - protein, 21 aa, Artificial sequence
  Synthetic peptide
VPLGTQYTDAPSFSDIPNPIG

SEQ ID NO: 912 - protein, 21 aa, Artificial sequence
  Synthetic peptide
PLGTQYTDAPSFSDIPNPIGS

SEQ ID NO: 913 - protein, 21 aa, Artificial sequence
  Synthetic peptide
LGTQYTDAPSFSDIPNPIGSE

SEQ ID NO: 914 - protein, 21 aa, Artificial sequence
  Synthetic peptide
GTQYTDAPSFSDIPNPIGSEN

SEQ ID NO: 915 - protein, 21 aa, Artificial sequence
  Synthetic peptide
TQYTDAPSFSDIPNPIGSENS

SEQ ID NO: 916 - protein, 21 aa, Artificial sequence
  Synthetic peptide
QYTDAPSFSDIPNPIGSENSE

SEQ ID NO: 917 - protein, 21 aa, Artificial sequence
  Synthetic peptide
YTDAPSFSDIPNPIGSENSEK

SEQ ID NO: 918 - protein, 21 aa, Artificial sequence
  Synthetic peptide
TDAPSFSDIPNPIGSENSEKT

SEQ ID NO: 919 - protein, 21 aa, Artificial sequence
  Synthetic peptide
DAPSFSDIPNPIGSENSEKTT

SEQ ID NO: 920 - protein, 21 aa, Artificial sequence
  Synthetic peptide
APSFSDIPNPIGSENSEKTTM

SEQ ID NO: 921 - protein, 21 aa, Artificial sequence
  Synthetic peptide
PSFSDIPNPIGSENSEKTTMP

SEQ ID NO: 922 - protein, 21 aa, Artificial sequence
  Synthetic peptide
SFSDIPNPIGSENSEKTTMPL

SEQ ID NO: 923 - protein, 21 aa, Artificial sequence
  Synthetic peptide
FSDIPNPIGSENSEKTTMPLW

SEQ ID NO: 924 - protein, 22 aa, Artificial sequence
  Synthetic peptide
YYVPLGTQYTDAPSFSDIPNPI

SEQ ID NO: 925 - protein, 22 aa, Artificial sequence
  Synthetic peptide
YVPLGTQYTDAPSFSDIPNPIG

SEQ ID NO: 926 - protein, 22 aa, Artificial sequence
  Synthetic peptide
VPLGTQYTDAPSFSDIPNPIGS

SEQ ID NO: 927 - protein, 22 aa, Artificial sequence
  Synthetic peptide
PLGTQYTDAPSFSDIPNPIGSE

SEQ ID NO: 928 - protein, 22 aa, Artificial sequence
  Synthetic peptide
LGTQYTDAPSFSDIPNPIGSEN

SEQ ID NO: 929 - protein, 22 aa, Artificial sequence
  Synthetic peptide
GTQYTDAPSFSDIPNPIGSENS

SEQ ID NO: 930 - protein, 22 aa, Artificial sequence
  Synthetic peptide
TQYTDAPSFSDIPNPIGSENSE

SEQ ID NO: 931 - protein, 22 aa, Artificial sequence
  Synthetic peptide
QYTDAPSFSDIPNPIGSENSEK

SEQ ID NO: 932 - protein, 22 aa, Artificial sequence
  Synthetic peptide
YTDAPSFSDIPNPIGSENSEKT

SEQ ID NO: 933 - protein, 22 aa, Artificial sequence
  Synthetic peptide
TDAPSFSDIPNPIGSENSEKTT

SEQ ID NO: 934 - protein, 22 aa, Artificial sequence
  Synthetic peptide
DAPSFSDIPNPIGSENSEKTTM

SEQ ID NO: 935 - protein, 22 aa, Artificial sequence
  Synthetic peptide
APSFSDIPNPIGSENSEKTTMP

SEQ ID NO: 936 - protein, 22 aa, Artificial sequence
  Synthetic peptide
PSFSDIPNPIGSENSEKTTMPL

SEQ ID NO: 937 - protein, 22 aa, Artificial sequence
  Synthetic peptide
SFSDIPNPIGSENSEKTTMPLW

SEQ ID NO: 938 - protein, 23 aa, Artificial sequence
  Synthetic peptide
YYVPLGTQYTDAPSFSDIPNPIG

SEQ ID NO: 939 - protein, 23 aa, Artificial sequence
  Synthetic peptide
YVPLGTQYTDAPSFSDIPNPIGS

SEQ ID NO: 940 - protein, 23 aa, Artificial sequence
  Synthetic peptide
VPLGTQYTDAPSFSDIPNPIGSE

SEQ ID NO: 941 - protein, 23 aa, Artificial sequence
  Synthetic peptide
PLGTQYTDAPSFSDIPNPIGSEN

SEQ ID NO: 942 - protein, 23 aa, Artificial sequence
  Synthetic peptide
LGTQYTDAPSFSDIPNPIGSENS

SEQ ID NO: 943 - protein, 23 aa, Artificial sequence
  Synthetic peptide
GTQYTDAPSFSDIPNPIGSENSE

SEQ ID NO: 944 - protein, 23 aa, Artificial sequence
  Synthetic peptide
TQYTDAPSFSDIPNPIGSENSEK

SEQ ID NO: 945 - protein, 23 aa, Artificial sequence
  Synthetic peptide
QYTDAPSFSDIPNPIGSENSEKT

SEQ ID NO: 946 - protein, 23 aa, Artificial sequence
  Synthetic peptide
YTDAPSFSDIPNPIGSENSEKTT

SEQ ID NO: 947 - protein, 23 aa, Artificial sequence
  Synthetic peptide
TDAPSFSDIPNPIGSENSEKTTM

SEQ ID NO: 948 - protein, 23 aa, Artificial sequence
  Synthetic peptide
DAPSFSDIPNPIGSENSEKTTMP

SEQ ID NO: 949 - protein, 23 aa, Artificial sequence
  Synthetic peptide
APSFSDIPNPIGSENSEKTTMPL

SEQ ID NO: 950 - protein, 23 aa, Artificial sequence
  Synthetic peptide
PSFSDIPNPIGSENSEKTTMPLW

SEQ ID NO: 951 - protein, 24 aa, Artificial sequence
  Synthetic peptide
YYVPLGTQYTDAPSFSDIPNPIGS

SEQ ID NO: 952 - protein, 24 aa, Artificial sequence
  Synthetic peptide
YVPLGTQYTDAPSFSDIPNPIGSE

SEQ ID NO: 953 - protein, 24 aa, Artificial sequence
  Synthetic peptide
VPLGTQYTDAPSFSDIPNPIGSEN

SEQ ID NO: 954 - protein, 24 aa, Artificial sequence
  Synthetic peptide
PLGTQYTDAPSFSDIPNPIGSENS

SEQ ID NO: 955 - protein, 24 aa, Artificial sequence
  Synthetic peptide
LGTQYTDAPSFSDIPNPIGSENSE

SEQ ID NO: 956 - protein, 24 aa, Artificial sequence
  Synthetic peptide
GTQYTDAPSFSDIPNPIGSENSEK

SEQ ID NO: 957 - protein, 24 aa, Artificial sequence
  Synthetic peptide
TQYTDAPSFSDIPNPIGSENSEKT

SEQ ID NO: 958 - protein, 24 aa, Artificial sequence
  Synthetic peptide
QYTDAPSFSDIPNPIGSENSEKTT

SEQ ID NO: 959 - protein, 24 aa, Artificial sequence
  Synthetic peptide
YTDAPSFSDIPNPIGSENSEKTTM

SEQ ID NO: 960 - protein, 24 aa, Artificial sequence
  Synthetic peptide
TDAPSFSDIPNPIGSENSEKTTMP

SEQ ID NO: 961 - protein, 24 aa, Artificial sequence
  Synthetic peptide
DAPSFSDIPNPIGSENSEKTTMPL

SEQ ID NO: 962 - protein, 24 aa, Artificial sequence
  Synthetic peptide
APSFSDIPNPIGSENSEKTTMPLW

SEQ ID NO: 963 - protein, 25 aa, Artificial sequence
  Synthetic peptide
YYVPLGTQYTDAPSFSDIPNPIGSE

SEQ ID NO: 964 - protein, 25 aa, Artificial sequence
  Synthetic peptide
YVPLGTQYTDAPSFSDIPNPIGSEN

SEQ ID NO: 965 - protein, 25 aa, Artificial sequence
  Synthetic peptide
VPLGTQYTDAPSFSDIPNPIGSENS

SEQ ID NO: 966 - protein, 25 aa, Artificial sequence
  Synthetic peptide
PLGTQYTDAPSFSDIPNPIGSENSE

SEQ ID NO: 967 - protein, 25 aa, Artificial sequence
  Synthetic peptide
LGTQYTDAPSFSDIPNPIGSENSEK

SEQ ID NO: 968 - protein, 25 aa, Artificial sequence
  Synthetic peptide
GTQYTDAPSFSDIPNPIGSENSEKT

SEQ ID NO: 969 - protein, 25 aa, Artificial sequence
  Synthetic peptide
TQYTDAPSFSDIPNPIGSENSEKTT

SEQ ID NO: 970 - protein, 25 aa, Artificial sequence
  Synthetic peptide
QYTDAPSFSDIPNPIGSENSEKTTM

SEQ ID NO: 971 - protein, 25 aa, Artificial sequence
  Synthetic peptide
YTDAPSFSDIPNPIGSENSEKTTMP

SEQ ID NO: 972 - protein, 25 aa, Artificial sequence
  Synthetic peptide
TDAPSFSDIPNPIGSENSEKTTMPL

SEQ ID NO: 973 - protein, 25 aa, Artificial sequence
  Synthetic peptide
DAPSFSDIPNPIGSENSEKTTMPLW

SEQ ID NO: 974 - protein, 26 aa, Artificial sequence
  Synthetic peptide
YYVPLGTQYTDAPSFSDIPNPIGSEN

SEQ ID NO: 975 - protein, 26 aa, Artificial sequence
  Synthetic peptide
YVPLGTQYTDAPSFSDIPNPIGSENS

SEQ ID NO: 976 - protein, 26 aa, Artificial sequence
  Synthetic peptide
VPLGTQYTDAPSFSDIPNPIGSENSE

SEQ ID NO: 977 - protein, 26 aa, Artificial sequence
  Synthetic peptide
PLGTQYTDAPSFSDIPNPIGSENSEK

SEQ ID NO: 978 - protein, 26 aa, Artificial sequence
  Synthetic peptide
LGTQYTDAPSFSDIPNPIGSENSEKT

SEQ ID NO: 979 - protein, 26 aa, Artificial sequence
  Synthetic peptide
GTQYTDAPSFSDIPNPIGSENSEKTT

SEQ ID NO: 980 - protein, 26 aa, Artificial sequence
  Synthetic peptide
TQYTDAPSFSDIPNPIGSENSEKTTM

SEQ ID NO: 981 - protein, 26 aa, Artificial sequence
  Synthetic peptide
QYTDAPSFSDIPNPIGSENSEKTTMP

SEQ ID NO: 982 - protein, 26 aa, Artificial sequence
  Synthetic peptide
YTDAPSFSDIPNPIGSENSEKTTMPL

SEQ ID NO: 983 - protein, 26 aa, Artificial sequence
  Synthetic peptide
TDAPSFSDIPNPIGSENSEKTTMPLW

SEQ ID NO: 984 - protein, 27 aa, Artificial sequence
  Synthetic peptide
YYVPLGTQYTDAPSFSDIPNPIGSENS

SEQ ID NO: 985 - protein, 27 aa, Artificial sequence
  Synthetic peptide
YVPLGTQYTDAPSFSDIPNPIGSENSE

SEQ ID NO: 986 - protein, 27 aa, Artificial sequence
  Synthetic peptide
VPLGTQYTDAPSFSDIPNPIGSENSEK

SEQ ID NO: 987 - protein, 27 aa, Artificial sequence
  Synthetic peptide
PLGTQYTDAPSFSDIPNPIGSENSEKT

SEQ ID NO: 988 - protein, 27 aa, Artificial sequence
  Synthetic peptide
LGTQYTDAPSFSDIPNPIGSENSEKTT

SEQ ID NO: 989 - protein, 27 aa, Artificial sequence
  Synthetic peptide
GTQYTDAPSFSDIPNPIGSENSEKTTM

SEQ ID NO: 990 - protein, 27 aa, Artificial sequence
  Synthetic peptide
TQYTDAPSFSDIPNPIGSENSEKTTMP

SEQ ID NO: 991 - protein, 27 aa, Artificial sequence
  Synthetic peptide
QYTDAPSFSDIPNPIGSENSEKTTMPL

SEQ ID NO: 992 - protein, 27 aa, Artificial sequence
  Synthetic peptide
YTDAPSFSDIPNPIGSENSEKTTMPLW

SEQ ID NO: 993 - protein, 28 aa, Artificial sequence
  Synthetic peptide
YYVPLGTQYTDAPSFSDIPNPIGSENSE

SEQ ID NO: 994 - protein, 28 aa, Artificial sequence
  Synthetic peptide
YVPLGTQYTDAPSFSDIPNPIGSENSEK

SEQ ID NO: 995 - protein, 28 aa, Artificial sequence
  Synthetic peptide
VPLGTQYTDAPSFSDIPNPIGSENSEKT

SEQ ID NO: 996 - protein, 28 aa, Artificial sequence
  Synthetic peptide
PLGTQYTDAPSFSDIPNPIGSENSEKTT

SEQ ID NO: 997 - protein, 28 aa, Artificial sequence
  Synthetic peptide
LGTQYTDAPSFSDIPNPIGSENSEKTTM

SEQ ID NO: 998 - protein, 28 aa, Artificial sequence
  Synthetic peptide
GTQYTDAPSFSDIPNPIGSENSEKTTMP

SEQ ID NO: 999 - protein, 28 aa, Artificial sequence
  Synthetic peptide
TQYTDAPSFSDIPNPIGSENSEKTTMPL

SEQ ID NO: 1000 - protein, 28 aa, Artificial sequence
  Synthetic peptide
QYTDAPSFSDIPNPIGSENSEKTTMPLW

SEQ ID NO: 1001 - protein, 29 aa, Artificial sequence
  Synthetic peptide
YYVPLGTQYTDAPSFSDIPNPIGSENSEK

SEQ ID NO: 1002 - protein, 29 aa, Artificial sequence
  Synthetic peptide
YVPLGTQYTDAPSFSDIPNPIGSENSEKT

SEQ ID NO: 1003 - protein, 29 aa, Artificial sequence
  Synthetic peptide
VPLGTQYTDAPSFSDIPNPIGSENSEKTT

SEQ ID NO: 1004 - protein, 29 aa, Artificial sequence
  Synthetic peptide
PLGTQYTDAPSFSDIPNPIGSENSEKTTM

SEQ ID NO: 1005 - protein, 29 aa, Artificial sequence
  Synthetic peptide
LGTQYTDAPSFSDIPNPIGSENSEKTTMP

SEQ ID NO: 1006 - protein, 29 aa, Artificial sequence
  Synthetic peptide
GTQYTDAPSFSDIPNPIGSENSEKTTMPL

SEQ ID NO: 1007 - protein, 29 aa, Artificial sequence
  Synthetic peptide
TQYTDAPSFSDIPNPIGSENSEKTTMPLW

SEQ ID NO: 1008 - protein, 30 aa, Artificial sequence
  Synthetic peptide
YYVPLGTQYTDAPSFSDIPNPIGSENSEKT

SEQ ID NO: 1009 - protein, 30 aa, Artificial sequence
  Synthetic peptide
YVPLGTQYTDAPSFSDIPNPIGSENSEKTT

SEQ ID NO: 1010 - protein, 30 aa, Artificial sequence
  Synthetic peptide
VPLGTQYTDAPSFSDIPNPIGSENSEKTTM

SEQ ID NO: 1011 - protein, 30 aa, Artificial sequence
  Synthetic peptide
PLGTQYTDAPSFSDIPNPIGSENSEKTTMP

SEQ ID NO: 1012 - protein, 30 aa, Artificial sequence
  Synthetic peptide
LGTQYTDAPSFSDIPNPIGSENSEKTTMPL

SEQ ID NO: 1013 - protein, 30 aa, Artificial sequence
  Synthetic peptide
GTQYTDAPSFSDIPNPIGSENSEKTTMPLW

SEQ ID NO: 1014 - protein, 31 aa, Artificial sequence
  Synthetic peptide
YYVPLGTQYTDAPSFSDIPNPIGSENSEKTT

SEQ ID NO: 1015 - protein, 31 aa, Artificial sequence
  Synthetic peptide
YVPLGTQYTDAPSFSDIPNPIGSENSEKTTM

SEQ ID NO: 1016 - protein, 31 aa, Artificial sequence
  Synthetic peptide
VPLGTQYTDAPSFSDIPNPIGSENSEKTTMP

SEQ ID NO: 1017 - protein, 31 aa, Artificial sequence
  Synthetic peptide
PLGTQYTDAPSFSDIPNPIGSENSEKTTMPL

SEQ ID NO: 1018 - protein, 31 aa, Artificial sequence
  Synthetic peptide
LGTQYTDAPSFSDIPNPIGSENSEKTTMPLW

SEQ ID NO: 1019 - protein, 32 aa, Artificial sequence
  Synthetic peptide
YYVPLGTQYTDAPSFSDIPNPIGSENSEKTTM

SEQ ID NO: 1020 - protein, 32 aa, Artificial sequence
  Synthetic peptide
YVPLGTQYTDAPSFSDIPNPIGSENSEKTTMP

SEQ ID NO: 1021 - protein, 32 aa, Artificial sequence
  Synthetic peptide
VPLGTQYTDAPSFSDIPNPIGSENSEKTTMPL

SEQ ID NO: 1022 - protein, 32 aa, Artificial sequence
  Synthetic peptide
PLGTQYTDAPSFSDIPNPIGSENSEKTTMPLW

SEQ ID NO: 1023 - protein, 33 aa, Artificial sequence
  Synthetic peptide
YYVPLGTQYTDAPSFSDIPNPIGSENSEKTTMP

SEQ ID NO: 1024 - protein, 33 aa, Artificial sequence
  Synthetic peptide
YVPLGTQYTDAPSFSDIPNPIGSENSEKTTMPL

SEQ ID NO: 1025 - protein, 33 aa, Artificial sequence
  Synthetic peptide
VPLGTQYTDAPSFSDIPNPIGSENSEKTTMPLW

SEQ ID NO: 1026 - protein, 34 aa, Artificial sequence
  Synthetic peptide
YYVPLGTQYTDAPSFSDIPNPIGSENSEKTTMPL

SEQ ID NO: 1027 - protein, 34 aa, Artificial sequence
  Synthetic peptide
YVPLGTQYTDAPSFSDIPNPIGSENSEKTTMPLW

SEQ ID NO: 1028 - protein, 2 aa, Artificial sequence
  Synthetic peptide
TV

SEQ ID NO: 1029 - protein, 2 aa, Artificial sequence
  Synthetic peptide
VY

SEQ ID NO: 1030 - protein, 2 aa, Artificial sequence
  Synthetic peptide
YQ

SEQ ID NO: 1031 - protein, 2 aa, Artificial sequence
  Synthetic peptide
QH

SEQ ID NO: 1032 - protein, 2 aa, Artificial sequence
  Synthetic peptide
HQ

SEQ ID NO: 1033 - protein, 2 aa, Artificial sequence
  Synthetic peptide
QK

SEQ ID NO: 1034 - protein, 2 aa, Artificial sequence
  Synthetic peptide
KA

SEQ ID NO: 1035 - protein, 2 aa, Artificial sequence
  Synthetic peptide
AM

SEQ ID NO: 1036 - protein, 2 aa, Artificial sequence
  Synthetic peptide
MK

SEQ ID NO: 1037 - protein, 2 aa, Artificial sequence
  Synthetic peptide
KP

SEQ ID NO: 1038 - protein, 2 aa, Artificial sequence
  Synthetic peptide
PW

SEQ ID NO: 1039 - protein, 2 aa, Artificial sequence
  Synthetic peptide
WI

SEQ ID NO: 1040 - protein, 2 aa, Artificial sequence
  Synthetic peptide
IQ

SEQ ID NO: 1041 - protein, 2 aa, Artificial sequence
  Synthetic peptide
QP

SEQ ID NO: 1042 - protein, 2 aa, Artificial sequence
  Synthetic peptide
PK

SEQ ID NO: 1043 - protein, 2 aa, Artificial sequence
  Synthetic peptide
KT

SEQ ID NO: 1044 - protein, 2 aa, Artificial sequence
  Synthetic peptide
TK

SEQ ID NO: 1045 - protein, 2 aa, Artificial sequence
  Synthetic peptide
KV

SEQ ID NO: 1046 - protein, 2 aa, Artificial sequence
  Synthetic peptide
VI

SEQ ID NO: 1047 - protein, 2 aa, Artificial sequence
  Synthetic peptide
IP

SEQ ID NO: 1048 - protein, 2 aa, Artificial sequence
  Synthetic peptide
PY

SEQ ID NO: 1049 - protein, 2 aa, Artificial sequence
  Synthetic peptide
YV

SEQ ID NO: 1050 - protein, 2 aa, Artificial sequence
  Synthetic peptide
VR

SEQ ID NO: 1051 - protein, 2 aa, Artificial sequence
  Synthetic peptide
RY

SEQ ID NO: 1052 - protein, 2 aa, Artificial sequence
  Synthetic peptide
YL

SEQ ID NO: 1053 - protein, 3 aa, Artificial sequence
  Synthetic peptide
TVY

SEQ ID NO: 1054 - protein, 3 aa, Artificial sequence
  Synthetic peptide
VYQ

SEQ ID NO: 1055 - protein, 3 aa, Artificial sequence
  Synthetic peptide
YQH

SEQ ID NO: 1056 - protein, 3 aa, Artificial sequence
  Synthetic peptide
QHQ

SEQ ID NO: 1057 - protein, 3 aa, Artificial sequence
  Synthetic peptide
HQK

SEQ ID NO: 1058 - protein, 3 aa, Artificial sequence
  Synthetic peptide
QKA

SEQ ID NO: 1059 - protein, 3 aa, Artificial sequence
  Synthetic peptide
KAM

SEQ ID NO: 1060 - protein, 3 aa, Artificial sequence
  Synthetic peptide
AMK

SEQ ID NO: 1061 - protein, 3 aa, Artificial sequence
  Synthetic peptide
MKP

SEQ ID NO: 1062 - protein, 3 aa, Artificial sequence
  Synthetic peptide
KPW

SEQ ID NO: 1063 - protein, 3 aa, Artificial sequence
  Synthetic peptide
PWI

SEQ ID NO: 1064 - protein, 3 aa, Artificial sequence
  Synthetic peptide
WIQ

SEQ ID NO: 1065 - protein, 3 aa, Artificial sequence
  Synthetic peptide
IQP

SEQ ID NO: 1066 - protein, 3 aa, Artificial sequence
  Synthetic peptide
QPK

SEQ ID NO: 1067 - protein, 3 aa, Artificial sequence
  Synthetic peptide
PKT

SEQ ID NO: 1068 - protein, 3 aa, Artificial sequence
  Synthetic peptide
KTK

SEQ ID NO: 1069 - protein, 3 aa, Artificial sequence
  Synthetic peptide
TKV

SEQ ID NO: 1070 - protein, 3 aa, Artificial sequence
  Synthetic peptide
KVI

SEQ ID NO: 1071 - protein, 3 aa, Artificial sequence
  Synthetic peptide
VIP

SEQ ID NO: 1072 - protein, 3 aa, Artificial sequence
  Synthetic peptide
IPY

SEQ ID NO: 1073 - protein, 3 aa, Artificial sequence
  Synthetic peptide
PYV

SEQ ID NO: 1074 - protein, 3 aa, Artificial sequence
  Synthetic peptide
YVR

SEQ ID NO: 1075 - protein, 3 aa, Artificial sequence
  Synthetic peptide
VRY

SEQ ID NO: 1076 - protein, 3 aa, Artificial sequence
  Synthetic peptide
RYL

SEQ ID NO: 1077 - protein, 4 aa, Artificial sequence
  Synthetic peptide
TVYQ

SEQ ID NO: 1078 - protein, 4 aa, Artificial sequence
  Synthetic peptide
VYQH

SEQ ID NO: 1079 - protein, 4 aa, Artificial sequence
  Synthetic peptide
YQHQ

SEQ ID NO: 1080 - protein, 4 aa, Artificial sequence
  Synthetic peptide
QHQK

SEQ ID NO: 1081 - protein, 4 aa, Artificial sequence
  Synthetic peptide
HQKA

SEQ ID NO: 1082 - protein, 4 aa, Artificial sequence
  Synthetic peptide
QKAM

SEQ ID NO: 1083 - protein, 4 aa, Artificial sequence
  Synthetic peptide
KAMK

SEQ ID NO: 1084 - protein, 4 aa, Artificial sequence
  Synthetic peptide
AMKP

SEQ ID NO: 1085 - protein, 4 aa, Artificial sequence
  Synthetic peptide
MKPW

SEQ ID NO: 1086 - protein, 4 aa, Artificial sequence
  Synthetic peptide
KPWI

SEQ ID NO: 1087 - protein, 4 aa, Artificial sequence
  Synthetic peptide
PWIQ

SEQ ID NO: 1088 - protein, 4 aa, Artificial sequence
  Synthetic peptide
WIQP

SEQ ID NO: 1089 - protein, 4 aa, Artificial sequence
  Synthetic peptide
IQPK

SEQ ID NO: 1090 - protein, 4 aa, Artificial sequence
  Synthetic peptide
QPKT

SEQ ID NO: 1091 - protein, 4 aa, Artificial sequence
  Synthetic peptide
PKTK

SEQ ID NO: 1092 - protein, 4 aa, Artificial sequence
  Synthetic peptide
KTKV

SEQ ID NO: 1093 - protein, 4 aa, Artificial sequence
  Synthetic peptide
TKVI

SEQ ID NO: 1094 - protein, 4 aa, Artificial sequence
  Synthetic peptide
KVIP

SEQ ID NO: 1095 - protein, 4 aa, Artificial sequence
  Synthetic peptide
VIPY

SEQ ID NO: 1096 - protein, 4 aa, Artificial sequence
  Synthetic peptide
IPYV

SEQ ID NO: 1097 - protein, 4 aa, Artificial sequence
  Synthetic peptide
PYVR

SEQ ID NO: 1098 - protein, 4 aa, Artificial sequence
  Synthetic peptide
YVRY

SEQ ID NO: 1099 - protein, 4 aa, Artificial sequence
  Synthetic peptide
VRYL

SEQ ID NO: 1100 - protein, 5 aa, Artificial sequence
  Synthetic peptide
TVYQH

SEQ ID NO: 1101 - protein, 5 aa, Artificial sequence
  Synthetic peptide
VYQHQ

SEQ ID NO: 1102 - protein, 5 aa, Artificial sequence
  Synthetic peptide
YQHQK

SEQ ID NO: 1103 - protein, 5 aa, Artificial sequence
  Synthetic peptide
QHQKA

SEQ ID NO: 1104 - protein, 5 aa, Artificial sequence
  Synthetic peptide
HQKAM

SEQ ID NO: 1105 - protein, 5 aa, Artificial sequence
  Synthetic peptide
QKAMK

SEQ ID NO: 1106 - protein, 5 aa, Artificial sequence
  Synthetic peptide
KAMKP

SEQ ID NO: 1107 - protein, 5 aa, Artificial sequence
  Synthetic peptide
AMKPW

SEQ ID NO: 1108 - protein, 5 aa, Artificial sequence
  Synthetic peptide
MKPWI

SEQ ID NO: 1109 - protein, 5 aa, Artificial sequence
  Synthetic peptide
KPWIQ

SEQ ID NO: 1110 - protein, 5 aa, Artificial sequence
  Synthetic peptide
PWIQP

SEQ ID NO: 1111 - protein, 5 aa, Artificial sequence
  Synthetic peptide
WIQPK

SEQ ID NO: 1112 - protein, 5 aa, Artificial sequence
  Synthetic peptide
IQPKT

SEQ ID NO: 1113 - protein, 5 aa, Artificial sequence
  Synthetic peptide
QPKTK

SEQ ID NO: 1114 - protein, 5 aa, Artificial sequence
  Synthetic peptide
PKTKV

SEQ ID NO: 1115 - protein, 5 aa, Artificial sequence
  Synthetic peptide
KTKVI

SEQ ID NO: 1116 - protein, 5 aa, Artificial sequence
  Synthetic peptide
TKVIP

SEQ ID NO: 1117 - protein, 5 aa, Artificial sequence
  Synthetic peptide
KVIPY

SEQ ID NO: 1118 - protein, 5 aa, Artificial sequence
  Synthetic peptide
VIPYV

SEQ ID NO: 1119 - protein, 5 aa, Artificial sequence
  Synthetic peptide
IPYVR

SEQ ID NO: 1120 - protein, 5 aa, Artificial sequence
  Synthetic peptide
PYVRY

SEQ ID NO: 1121 - protein, 5 aa, Artificial sequence
  Synthetic peptide
YVRYL

SEQ ID NO: 1122 - protein, 6 aa, Artificial sequence
  Synthetic peptide
TVYQHQ

SEQ ID NO: 1123 - protein, 6 aa, Artificial sequence
  Synthetic peptide
VYQHQK

SEQ ID NO: 1124 - protein, 6 aa, Artificial sequence
  Synthetic peptide
YQHQKA

SEQ ID NO: 1125 - protein, 6 aa, Artificial sequence
  Synthetic peptide
QHQKAM

SEQ ID NO: 1126 - protein, 6 aa, Artificial sequence
  Synthetic peptide
HQKAMK

SEQ ID NO: 1127 - protein, 6 aa, Artificial sequence
  Synthetic peptide
QKAMKP

SEQ ID NO: 1128 - protein, 6 aa, Artificial sequence
  Synthetic peptide
KAMKPW

SEQ ID NO: 1129 - protein, 6 aa, Artificial sequence
  Synthetic peptide
AMKPWI

SEQ ID NO: 1130 - protein, 6 aa, Artificial sequence
  Synthetic peptide
MKPWIQ

SEQ ID NO: 1131 - protein, 6 aa, Artificial sequence
  Synthetic peptide
KPWIQP

SEQ ID NO: 1132 - protein, 6 aa, Artificial sequence
  Synthetic peptide
PWIQPK

SEQ ID NO: 1133 - protein, 6 aa, Artificial sequence
  Synthetic peptide
WIQPKT

SEQ ID NO: 1134 - protein, 6 aa, Artificial sequence
  Synthetic peptide
IQPKTK

SEQ ID NO: 1135 - protein, 6 aa, Artificial sequence
  Synthetic peptide
QPKTKV

SEQ ID NO: 1136 - protein, 6 aa, Artificial sequence
  Synthetic peptide
PKTKVI

SEQ ID NO: 1137 - protein, 6 aa, Artificial sequence
  Synthetic peptide
KTKVIP

SEQ ID NO: 1138 - protein, 6 aa, Artificial sequence
  Synthetic peptide
TKVIPY

SEQ ID NO: 1139 - protein, 6 aa, Artificial sequence
  Synthetic peptide
KVIPYV

SEQ ID NO: 1140 - protein, 6 aa, Artificial sequence
  Synthetic peptide
VIPYVR

SEQ ID NO: 1141 - protein, 6 aa, Artificial sequence
  Synthetic peptide
IPYVRY

SEQ ID NO: 1142 - protein, 6 aa, Artificial sequence
  Synthetic peptide
PYVRYL

SEQ ID NO: 1143 - protein, 7 aa, Artificial sequence
  Synthetic peptide
TVYQHQK

SEQ ID NO: 1144 - protein, 7 aa, Artificial sequence
  Synthetic peptide
VYQHQKA

SEQ ID NO: 1145 - protein, 7 aa, Artificial sequence
  Synthetic peptide
YQHQKAM

SEQ ID NO: 1146 - protein, 7 aa, Artificial sequence
  Synthetic peptide
QHQKAMK

SEQ ID NO: 1147 - protein, 7 aa, Artificial sequence
  Synthetic peptide
HQKAMKP

SEQ ID NO: 1148 - protein, 7 aa, Artificial sequence
  Synthetic peptide
QKAMKPW

SEQ ID NO: 1149 - protein, 7 aa, Artificial sequence
  Synthetic peptide
KAMKPWI

SEQ ID NO: 1150 - protein, 7 aa, Artificial sequence
  Synthetic peptide
AMKPWIQ

SEQ ID NO: 1151 - protein, 7 aa, Artificial sequence
  Synthetic peptide
MKPWIQP

SEQ ID NO: 1152 - protein, 7 aa, Artificial sequence
  Synthetic peptide
KPWIQPK

SEQ ID NO: 1153 - protein, 7 aa, Artificial sequence
  Synthetic peptide
PWIQPKT

SEQ ID NO: 1154 - protein, 7 aa, Artificial sequence
  Synthetic peptide
WIQPKTK

SEQ ID NO: 1155 - protein, 7 aa, Artificial sequence
  Synthetic peptide
IQPKTKV

SEQ ID NO: 1156 - protein, 7 aa, Artificial sequence
  Synthetic peptide
QPKTKVI

SEQ ID NO: 1157 - protein, 7 aa, Artificial sequence
  Synthetic peptide
PKTKVIP

SEQ ID NO: 1158 - protein, 7 aa, Artificial sequence
  Synthetic peptide
KTKVIPY

SEQ ID NO: 1159 - protein, 7 aa, Artificial sequence
  Synthetic peptide
TKVIPYV

SEQ ID NO: 1160 - protein, 7 aa, Artificial sequence
  Synthetic peptide
KVIPYVR

SEQ ID NO: 1161 - protein, 7 aa, Artificial sequence
  Synthetic peptide
VIPYVRY

SEQ ID NO: 1162 - protein, 7 aa, Artificial sequence
  Synthetic peptide
IPYVRYL

SEQ ID NO: 1163 - protein, 8 aa, Artificial sequence
  Synthetic peptide
TVYQHQKA

SEQ ID NO: 1164 - protein, 8 aa, Artificial sequence
  Synthetic peptide
VYQHQKAM

SEQ ID NO: 1165 - protein, 8 aa, Artificial sequence
  Synthetic peptide
YQHQKAMK

SEQ ID NO: 1166 - protein, 8 aa, Artificial sequence
  Synthetic peptide
QHQKAMKP

SEQ ID NO: 1167 - protein, 8 aa, Artificial sequence
  Synthetic peptide
HQKAMKPW

SEQ ID NO: 1168 - protein, 8 aa, Artificial sequence
  Synthetic peptide
QKAMKPWI

SEQ ID NO: 1169 - protein, 8 aa, Artificial sequence
  Synthetic peptide
KAMKPWIQ

SEQ ID NO: 1170 - protein, 8 aa, Artificial sequence
  Synthetic peptide
AMKPWIQP

SEQ ID NO: 1171 - protein, 8 aa, Artificial sequence
  Synthetic peptide
MKPWIQPK

SEQ ID NO: 1172 - protein, 8 aa, Artificial sequence
  Synthetic peptide
KPWIQPKT

SEQ ID NO: 1173 - protein, 8 aa, Artificial sequence
  Synthetic peptide
PWIQPKTK

SEQ ID NO: 1174 - protein, 8 aa, Artificial sequence
  Synthetic peptide
WIQPKTKV

SEQ ID NO: 1175 - protein, 8 aa, Artificial sequence
  Synthetic peptide
IQPKTKVI

SEQ ID NO: 1176 - protein, 8 aa, Artificial sequence
  Synthetic peptide
QPKTKVIP

SEQ ID NO: 1177 - protein, 8 aa, Artificial sequence
  Synthetic peptide
PKTKVIPY

SEQ ID NO: 1178 - protein, 8 aa, Artificial sequence
  Synthetic peptide
KTKVIPYV

SEQ ID NO: 1179 - protein, 8 aa, Artificial sequence
  Synthetic peptide
TKVIPYVR

SEQ ID NO: 1180 - protein, 8 aa, Artificial sequence
  Synthetic peptide
KVIPYVRY

SEQ ID NO: 1181 - protein, 8 aa, Artificial sequence
  Synthetic peptide
VIPYVRYL

SEQ ID NO: 1182 - protein, 9 aa, Artificial sequence
  Synthetic peptide
TVYQHQKAM

SEQ ID NO: 1183 - protein, 9 aa, Artificial sequence
  Synthetic peptide
VYQHQKAMK

SEQ ID NO: 1184 - protein, 9 aa, Artificial sequence
  Synthetic peptide
YQHQKAMKP

SEQ ID NO: 1185 - protein, 9 aa, Artificial sequence
  Synthetic peptide
QHQKAMKPW

SEQ ID NO: 1186 - protein, 9 aa, Artificial sequence
  Synthetic peptide
HQKAMKPWI

SEQ ID NO: 1187 - protein, 9 aa, Artificial sequence
  Synthetic peptide
QKAMKPWIQ

SEQ ID NO: 1188 - protein, 9 aa, Artificial sequence
  Synthetic peptide
KAMKPWIQP

SEQ ID NO: 1189 - protein, 9 aa, Artificial sequence
  Synthetic peptide
AMKPWIQPK

SEQ ID NO: 1190 - protein, 9 aa, Artificial sequence
  Synthetic peptide
MKPWIQPKT

SEQ ID NO: 1191 - protein, 9 aa, Artificial sequence
  Synthetic peptide
KPWIQPKTK

SEQ ID NO: 1192 - protein, 9 aa, Artificial sequence
  Synthetic peptide
PWIQPKTKV

SEQ ID NO: 1193 - protein, 9 aa, Artificial sequence
  Synthetic peptide
WIQPKTKVI

SEQ ID NO: 1194 - protein, 9 aa, Artificial sequence
  Synthetic peptide
IQPKTKVIP

SEQ ID NO: 1195 - protein, 9 aa, Artificial sequence
  Synthetic peptide
QPKTKVIPY

SEQ ID NO: 1196 - protein, 9 aa, Artificial sequence
  Synthetic peptide
PKTKVIPYV

SEQ ID NO: 1197 - protein, 9 aa, Artificial sequence
  Synthetic peptide
KTKVIPYVR

SEQ ID NO: 1198 - protein, 9 aa, Artificial sequence
  Synthetic peptide
TKVIPYVRY

SEQ ID NO: 1199 - protein, 9 aa, Artificial sequence
  Synthetic peptide
KVIPYVRYL

SEQ ID NO: 1200 - protein, 10 aa, Artificial sequence
  Synthetic peptide
TVYQHQKAMK

SEQ ID NO: 1201 - protein, 10 aa, Artificial sequence
  Synthetic peptide
VYQHQKAMKP

SEQ ID NO: 1202 - protein, 10 aa, Artificial sequence
  Synthetic peptide
YQHQKAMKPW

SEQ ID NO: 1203 - protein, 10 aa, Artificial sequence
  Synthetic peptide
QHQKAMKPWI

SEQ ID NO: 1204 - protein, 10 aa, Artificial sequence
  Synthetic peptide
HQKAMKPWIQ

SEQ ID NO: 1205 - protein, 10 aa, Artificial sequence
  Synthetic peptide
QKAMKPWIQP

SEQ ID NO: 1206 - protein, 10 aa, Artificial sequence
  Synthetic peptide
KAMKPWIQPK

SEQ ID NO: 1207 - protein, 10 aa, Artificial sequence
  Synthetic peptide
AMKPWIQPKT

SEQ ID NO: 1208 - protein, 10 aa, Artificial sequence
  Synthetic peptide
MKPWIQPKTK

SEQ ID NO: 1209 - protein, 10 aa, Artificial sequence
  Synthetic peptide
KPWIQPKTKV

SEQ ID NO: 1210 - protein, 10 aa, Artificial sequence
  Synthetic peptide
PWIQPKTKVI

SEQ ID NO: 1211 - protein, 10 aa, Artificial sequence
  Synthetic peptide
WIQPKTKVIP

SEQ ID NO: 1212 - protein, 10 aa, Artificial sequence
  Synthetic peptide
IQPKTKVIPY

SEQ ID NO: 1213 - protein, 10 aa, Artificial sequence
  Synthetic peptide
QPKTKVIPYV

SEQ ID NO: 1214 - protein, 10 aa, Artificial sequence
  Synthetic peptide
PKTKVIPYVR

SEQ ID NO: 1215 - protein, 10 aa, Artificial sequence
  Synthetic peptide
KTKVIPYVRY

SEQ ID NO: 1216 - protein, 10 aa, Artificial sequence
  Synthetic peptide
TKVIPYVRYL

SEQ ID NO: 1217 - protein, 11 aa, Artificial sequence
  Synthetic peptide
TVYQHQKAMKP

SEQ ID NO: 1218 - protein, 11 aa, Artificial sequence
  Synthetic peptide
VYQHQKAMKPW

SEQ ID NO: 1219 - protein, 11 aa, Artificial sequence
  Synthetic peptide
YQHQKAMKPWI

SEQ ID NO: 1220 - protein, 11 aa, Artificial sequence
  Synthetic peptide
QHQKAMKPWIQ

SEQ ID NO: 1221 - protein, 11 aa, Artificial sequence
  Synthetic peptide
HQKAMKPWIQP

SEQ ID NO: 1222 - protein, 11 aa, Artificial sequence
  Synthetic peptide
QKAMKPWIQPK

SEQ ID NO: 1223 - protein, 11 aa, Artificial sequence
  Synthetic peptide
KAMKPWIQPKT

SEQ ID NO: 1224 - protein, 11 aa, Artificial sequence
  Synthetic peptide
AMKPWIQPKTK

SEQ ID NO: 1225 - protein, 11 aa, Artificial sequence
  Synthetic peptide
MKPWIQPKTKV

SEQ ID NO: 1226 - protein, 11 aa, Artificial sequence
  Synthetic peptide
KPWIQPKTKVI

SEQ ID NO: 1227 - protein, 11 aa, Artificial sequence
  Synthetic peptide
PWIQPKTKVIP

SEQ ID NO: 1228 - protein, 11 aa, Artificial sequence
  Synthetic peptide
WIQPKTKVIPY

SEQ ID NO: 1229 - protein, 11 aa, Artificial sequence
  Synthetic peptide
IQPKTKVIPYV

SEQ ID NO: 1230 - protein, 11 aa, Artificial sequence
  Synthetic peptide
QPKTKVIPYVR

SEQ ID NO: 1231 - protein, 11 aa, Artificial sequence
  Synthetic peptide
PKTKVIPYVRY

SEQ ID NO: 1232 - protein, 11 aa, Artificial sequence
  Synthetic peptide
KTKVIPYVRYL

SEQ ID NO: 1233 - protein, 12 aa, Artificial sequence
  Synthetic peptide
TVYQHQKAMKPW

SEQ ID NO: 1234 - protein, 12 aa, Artificial sequence
  Synthetic peptide
VYQHQKAMKPWI

SEQ ID NO: 1235 - protein, 12 aa, Artificial sequence
  Synthetic peptide
YQHQKAMKPWIQ

SEQ ID NO: 1236 - protein, 12 aa, Artificial sequence
  Synthetic peptide
QHQKAMKPWIQP

SEQ ID NO: 1237 - protein, 12 aa, Artificial sequence
  Synthetic peptide
HQKAMKPWIQPK

SEQ ID NO: 1238 - protein, 12 aa, Artificial sequence
  Synthetic peptide
QKAMKPWIQPKT

SEQ ID NO: 1239 - protein, 12 aa, Artificial sequence
  Synthetic peptide
KAMKPWIQPKTK

SEQ ID NO: 1240 - protein, 12 aa, Artificial sequence
  Synthetic peptide
AMKPWIQPKTKV

SEQ ID NO: 1241 - protein, 12 aa, Artificial sequence
  Synthetic peptide
MKPWIQPKTKVI

SEQ ID NO: 1242 - protein, 12 aa, Artificial sequence
  Synthetic peptide
KPWIQPKTKVIP

SEQ ID NO: 1243 - protein, 12 aa, Artificial sequence
  Synthetic peptide
PWIQPKTKVIPY

SEQ ID NO: 1244 - protein, 12 aa, Artificial sequence
  Synthetic peptide
WIQPKTKVIPYV

SEQ ID NO: 1245 - protein, 12 aa, Artificial sequence
  Synthetic peptide
IQPKTKVIPYVR

SEQ ID NO: 1246 - protein, 12 aa, Artificial sequence
  Synthetic peptide
QPKTKVIPYVRY

SEQ ID NO: 1247 - protein, 12 aa, Artificial sequence
  Synthetic peptide
PKTKVIPYVRYL

SEQ ID NO: 1248 - protein, 13 aa, Artificial sequence
  Synthetic peptide
TVYQHQKAMKPWI

SEQ ID NO: 1249 - protein, 13 aa, Artificial sequence
  Synthetic peptide
VYQHQKAMKPWIQ

SEQ ID NO: 1250 - protein, 13 aa, Artificial sequence
  Synthetic peptide
YQHQKAMKPWIQP

SEQ ID NO: 1251 - protein, 13 aa, Artificial sequence
  Synthetic peptide
QHQKAMKPWIQPK

SEQ ID NO: 1252 - protein, 13 aa, Artificial sequence
  Synthetic peptide
HQKAMKPWIQPKT

SEQ ID NO: 1253 - protein, 13 aa, Artificial sequence
  Synthetic peptide
QKAMKPWIQPKTK

SEQ ID NO: 1254 - protein, 13 aa, Artificial sequence
  Synthetic peptide
KAMKPWIQPKTKV

SEQ ID NO: 1255 - protein, 13 aa, Artificial sequence
  Synthetic peptide
AMKPWIQPKTKVI

SEQ ID NO: 1256 - protein, 13 aa, Artificial sequence
  Synthetic peptide
MKPWIQPKTKVIP

SEQ ID NO: 1257 - protein, 13 aa, Artificial sequence
  Synthetic peptide
KPWIQPKTKVIPY

SEQ ID NO: 1258 - protein, 13 aa, Artificial sequence
  Synthetic peptide
PWIQPKTKVIPYV

SEQ ID NO: 1259 - protein, 13 aa, Artificial sequence
  Synthetic peptide
WIQPKTKVIPYVR

SEQ ID NO: 1260 - protein, 13 aa, Artificial sequence
  Synthetic peptide
IQPKTKVIPYVRY

SEQ ID NO: 1261 - protein, 13 aa, Artificial sequence
  Synthetic peptide
QPKTKVIPYVRYL

SEQ ID NO: 1262 - protein, 14 aa, Artificial sequence
  Synthetic peptide
TVYQHQKAMKPWIQ

SEQ ID NO: 1263 - protein, 14 aa, Artificial sequence
  Synthetic peptide
VYQHQKAMKPWIQP

SEQ ID NO: 1264 - protein, 14 aa, Artificial sequence
  Synthetic peptide
YQHQKAMKPWIQPK

SEQ ID NO: 1265 - protein, 14 aa, Artificial sequence
  Synthetic peptide
QHQKAMKPWIQPKT

SEQ ID NO: 1266 - protein, 14 aa, Artificial sequence
  Synthetic peptide
HQKAMKPWIQPKTK

SEQ ID NO: 1267 - protein, 14 aa, Artificial sequence
  Synthetic peptide
QKAMKPWIQPKTKV

SEQ ID NO: 1268 - protein, 14 aa, Artificial sequence
  Synthetic peptide
KAMKPWIQPKTKVI

SEQ ID NO: 1269 - protein, 14 aa, Artificial sequence
  Synthetic peptide
AMKPWIQPKTKVIP

SEQ ID NO: 1270 - protein, 14 aa, Artificial sequence
  Synthetic peptide
MKPWIQPKTKVIPY

SEQ ID NO: 1271 - protein, 14 aa, Artificial sequence
  Synthetic peptide
KPWIQPKTKVIPYV

SEQ ID NO: 1272 - protein, 14 aa, Artificial sequence
  Synthetic peptide
PWIQPKTKVIPYVR

SEQ ID NO: 1273 - protein, 14 aa, Artificial sequence
  Synthetic peptide
WIQPKTKVIPYVRY

SEQ ID NO: 1274 - protein, 14 aa, Artificial sequence
  Synthetic peptide
IQPKTKVIPYVRYL

SEQ ID NO: 1275 - protein, 15 aa, Artificial sequence
  Synthetic peptide
TVYQHQKAMKPWIQP

SEQ ID NO: 1276 - protein, 15 aa, Artificial sequence
  Synthetic peptide
VYQHQKAMKPWIQPK

SEQ ID NO: 1277 - protein, 15 aa, Artificial sequence
  Synthetic peptide
YQHQKAMKPWIQPKT

SEQ ID NO: 1278 - protein, 15 aa, Artificial sequence
  Synthetic peptide
QHQKAMKPWIQPKTK

SEQ ID NO: 1279 - protein, 15 aa, Artificial sequence
  Synthetic peptide
HQKAMKPWIQPKTKV

SEQ ID NO: 1280 - protein, 15 aa, Artificial sequence
  Synthetic peptide
QKAMKPWIQPKTKVI

SEQ ID NO: 1281 - protein, 15 aa, Artificial sequence
  Synthetic peptide
KAMKPWIQPKTKVIP

SEQ ID NO: 1282 - protein, 15 aa, Artificial sequence
  Synthetic peptide
AMKPWIQPKTKVIPY

SEQ ID NO: 1283 - protein, 15 aa, Artificial sequence
  Synthetic peptide
MKPWIQPKTKVIPYV

SEQ ID NO: 1284 - protein, 15 aa, Artificial sequence
  Synthetic peptide
KPWIQPKTKVIPYVR

SEQ ID NO: 1285 - protein, 15 aa, Artificial sequence
  Synthetic peptide
PWIQPKTKVIPYVRY

SEQ ID NO: 1286 - protein, 15 aa, Artificial sequence
  Synthetic peptide
WIQPKTKVIPYVRYL

SEQ ID NO: 1287 - protein, 16 aa, Artificial sequence
  Synthetic peptide
TVYQHQKAMKPWIQPK

SEQ ID NO: 1288 - protein, 16 aa, Artificial sequence
  Synthetic peptide
VYQHQKAMKPWIQPKT

SEQ ID NO: 1289 - protein, 16 aa, Artificial sequence
  Synthetic peptide
YQHQKAMKPWIQPKTK

SEQ ID NO: 1290 - protein, 16 aa, Artificial sequence
  Synthetic peptide
QHQKAMKPWIQPKTKV

SEQ ID NO: 1291 - protein, 16 aa, Artificial sequence
  Synthetic peptide
HQKAMKPWIQPKTKVI

SEQ ID NO: 1292 - protein, 16 aa, Artificial sequence
  Synthetic peptide
QKAMKPWIQPKTKVIP

SEQ ID NO: 1293 - protein, 16 aa, Artificial sequence
  Synthetic peptide
KAMKPWIQPKTKVIPY

SEQ ID NO: 1294 - protein, 16 aa, Artificial sequence
  Synthetic peptide
AMKPWIQPKTKVIPYV

SEQ ID NO: 1295 - protein, 16 aa, Artificial sequence
  Synthetic peptide
MKPWIQPKTKVIPYVR

SEQ ID NO: 1296 - protein, 16 aa, Artificial sequence
  Synthetic peptide
KPWIQPKTKVIPYVRY

SEQ ID NO: 1297 - protein, 16 aa, Artificial sequence
  Synthetic peptide
PWIQPKTKVIPYVRYL

SEQ ID NO: 1298 - protein, 17 aa, Artificial sequence
  Synthetic peptide
TVYQHQKAMKPWIQPKT

SEQ ID NO: 1299 - protein, 17 aa, Artificial sequence
  Synthetic peptide
VYQHQKAMKPWIQPKTK

SEQ ID NO: 1300 - protein, 17 aa, Artificial sequence
  Synthetic peptide
YQHQKAMKPWIQPKTKV

SEQ ID NO: 1301 - protein, 17 aa, Artificial sequence
  Synthetic peptide
QHQKAMKPWIQPKTKVI

SEQ ID NO: 1302 - protein, 17 aa, Artificial sequence
  Synthetic peptide
HQKAMKPWIQPKTKVIP

SEQ ID NO: 1303 - protein, 17 aa, Artificial sequence
  Synthetic peptide
QKAMKPWIQPKTKVIPY

SEQ ID NO: 1304 - protein, 17 aa, Artificial sequence
  Synthetic peptide
KAMKPWIQPKTKVIPYV

SEQ ID NO: 1305 - protein, 17 aa, Artificial sequence
  Synthetic peptide
AMKPWIQPKTKVIPYVR

SEQ ID NO: 1306 - protein, 17 aa, Artificial sequence
  Synthetic peptide
MKPWIQPKTKVIPYVRY

SEQ ID NO: 1307 - protein, 17 aa, Artificial sequence
  Synthetic peptide
KPWIQPKTKVIPYVRYL

SEQ ID NO: 1308 - protein, 18 aa, Artificial sequence
  Synthetic peptide
TVYQHQKAMKPWIQPKTK

SEQ ID NO: 1309 - protein, 18 aa, Artificial sequence
  Synthetic peptide
VYQHQKAMKPWIQPKTKV

SEQ ID NO: 1310 - protein, 18 aa, Artificial sequence
  Synthetic peptide
YQHQKAMKPWIQPKTKVI

SEQ ID NO: 1311 - protein, 18 aa, Artificial sequence
  Synthetic peptide
QHQKAMKPWIQPKTKVIP

SEQ ID NO: 1312 - protein, 18 aa, Artificial sequence
  Synthetic peptide
HQKAMKPWIQPKTKVIPY

SEQ ID NO: 1313 - protein, 18 aa, Artificial sequence
  Synthetic peptide
QKAMKPWIQPKTKVIPYV

SEQ ID NO: 1314 - protein, 18 aa, Artificial sequence
  Synthetic peptide
KAMKPWIQPKTKVIPYVR

SEQ ID NO: 1315 - protein, 18 aa, Artificial sequence
  Synthetic peptide
AMKPWIQPKTKVIPYVRY

SEQ ID NO: 1316 - protein, 18 aa, Artificial sequence
  Synthetic peptide
MKPWIQPKTKVIPYVRYL

SEQ ID NO: 1317 - protein, 19 aa, Artificial sequence
  Synthetic peptide
TVYQHQKAMKPWIQPKTKV

SEQ ID NO: 1318 - protein, 19 aa, Artificial sequence
  Synthetic peptide
VYQHQKAMKPWIQPKTKVI

SEQ ID NO: 1319 - protein, 19 aa, Artificial sequence
  Synthetic peptide
YQHQKAMKPWIQPKTKVIP

SEQ ID NO: 1320 - protein, 19 aa, Artificial sequence
  Synthetic peptide
QHQKAMKPWIQPKTKVIPY

SEQ ID NO: 1321 - protein, 19 aa, Artificial sequence
  Synthetic peptide
HQKAMKPWIQPKTKVIPYV

SEQ ID NO: 1322 - protein, 19 aa, Artificial sequence
  Synthetic peptide
QKAMKPWIQPKTKVIPYVR

SEQ ID NO: 1323 - protein, 19 aa, Artificial sequence
  Synthetic peptide
KAMKPWIQPKTKVIPYVRY

SEQ ID NO: 1324 - protein, 19 aa, Artificial sequence
  Synthetic peptide
AMKPWIQPKTKVIPYVRYL

SEQ ID NO: 1325 - protein, 20 aa, Artificial sequence
  Synthetic peptide
TVYQHQKAMKPWIQPKTKVI

SEQ ID NO: 1326 - protein, 20 aa, Artificial sequence
  Synthetic peptide
VYQHQKAMKPWIQPKTKVIP

SEQ ID NO: 1327 - protein, 20 aa, Artificial sequence
  Synthetic peptide
YQHQKAMKPWIQPKTKVIPY

SEQ ID NO: 1328 - protein, 20 aa, Artificial sequence
  Synthetic peptide
QHQKAMKPWIQPKTKVIPYV

SEQ ID NO: 1329 - protein, 20 aa, Artificial sequence
  Synthetic peptide
HQKAMKPWIQPKTKVIPYVR

SEQ ID NO: 1330 - protein, 20 aa, Artificial sequence
  Synthetic peptide
QKAMKPWIQPKTKVIPYVRY

SEQ ID NO: 1331 - protein, 20 aa, Artificial sequence
  Synthetic peptide
KAMKPWIQPKTKVIPYVRYL

SEQ ID NO: 1332 - protein, 21 aa, Artificial sequence
  Synthetic peptide
TVYQHQKAMKPWIQPKTKVIP

SEQ ID NO: 1333 - protein, 21 aa, Artificial sequence
  Synthetic peptide
VYQHQKAMKPWIQPKTKVIPY

SEQ ID NO: 1334 - protein, 21 aa, Artificial sequence
  Synthetic peptide
YQHQKAMKPWIQPKTKVIPYV

SEQ ID NO: 1335 - protein, 21 aa, Artificial sequence
  Synthetic peptide
QHQKAMKPWIQPKTKVIPYVR

SEQ ID NO: 1336 - protein, 21 aa, Artificial sequence
  Synthetic peptide
HQKAMKPWIQPKTKVIPYVRY

SEQ ID NO: 1337 - protein, 21 aa, Artificial sequence
  Synthetic peptide
QKAMKPWIQPKTKVIPYVRYL

SEQ ID NO: 1338 - protein, 22 aa, Artificial sequence
  Synthetic peptide
TVYQHQKAMKPWIQPKTKVIPY

SEQ ID NO: 1339 - protein, 22 aa, Artificial sequence
  Synthetic peptide
VYQHQKAMKPWIQPKTKVIPYV

SEQ ID NO: 1340 - protein, 22 aa, Artificial sequence
  Synthetic peptide
YQHQKAMKPWIQPKTKVIPYVR

SEQ ID NO: 1341 - protein, 22 aa, Artificial sequence
  Synthetic peptide
QHQKAMKPWIQPKTKVIPYVRY

SEQ ID NO: 1342 - protein, 22 aa, Artificial sequence
  Synthetic peptide
HQKAMKPWIQPKTKVIPYVRYL

SEQ ID NO: 1343 - protein, 23 aa, Artificial sequence
  Synthetic peptide
TVYQHQKAMKPWIQPKTKVIPYV

SEQ ID NO: 1344 - protein, 23 aa, Artificial sequence
  Synthetic peptide
VYQHQKAMKPWIQPKTKVIPYVR

SEQ ID NO: 1345 - protein, 23 aa, Artificial sequence
  Synthetic peptide
YQHQKAMKPWIQPKTKVIPYVRY

SEQ ID NO: 1346 - protein, 23 aa, Artificial sequence
  Synthetic peptide
QHQKAMKPWIQPKTKVIPYVRYL

SEQ ID NO: 1347 - protein, 24 aa, Artificial sequence
  Synthetic peptide
TVYQHQKAMKPWIQPKTKVIPYVR

SEQ ID NO: 1348 - protein, 24 aa, Artificial sequence
  Synthetic peptide
VYQHQKAMKPWIQPKTKVIPYVRY

SEQ ID NO: 1349 - protein, 24 aa, Artificial sequence
  Synthetic peptide
YQHQKAMKPWIQPKTKVIPYVRYL

SEQ ID NO: 1350 - protein, 25 aa, Artificial sequence
  Synthetic peptide
TVYQHQKAMKPWIQPKTKVIPYVRY

SEQ ID NO: 1351 - protein, 25 aa, Artificial sequence
  Synthetic peptide
VYQHQKAMKPWIQPKTKVIPYVRYL

SEQ ID NO: 1352 - protein, 26 aa, Artificial sequence
  Synthetic peptide
TVYQHQKAMKPWIQPKTKVIPYVRYL

SEQ ID NO: 1353 - protein, 2 aa, Artificial sequence
  Synthetic peptide
AM

SEQ ID NO: 1354 - protein, 2 aa, Artificial sequence
  Synthetic peptide
MK

SEQ ID NO: 1355 - protein, 2 aa, Artificial sequence
  Synthetic peptide
KP

SEQ ID NO: 1356 - protein, 2 aa, Artificial sequence
  Synthetic peptide
PW

SEQ ID NO: 1357 - protein, 2 aa, Artificial sequence
  Synthetic peptide
WI

SEQ ID NO: 1358 - protein, 2 aa, Artificial sequence
  Synthetic peptide
IQ

SEQ ID NO: 1359 - protein, 2 aa, Artificial sequence
  Synthetic peptide
QP

SEQ ID NO: 1360 - protein, 2 aa, Artificial sequence
  Synthetic peptide
PK

SEQ ID NO: 1361 - protein, 2 aa, Artificial sequence
  Synthetic peptide
KT

SEQ ID NO: 1362 - protein, 2 aa, Artificial sequence
  Synthetic peptide
TK

SEQ ID NO: 1363 - protein, 2 aa, Artificial sequence
  Synthetic peptide
KV

SEQ ID NO: 1364 - protein, 2 aa, Artificial sequence
  Synthetic peptide
VI

SEQ ID NO: 1365 - protein, 2 aa, Artificial sequence
  Synthetic peptide
IP

SEQ ID NO: 1366 - protein, 2 aa, Artificial sequence
  Synthetic peptide
PY

SEQ ID NO: 1367 - protein, 2 aa, Artificial sequence
  Synthetic peptide
YV

SEQ ID NO: 1368 - protein, 2 aa, Artificial sequence
  Synthetic peptide
VR

SEQ ID NO: 1369 - protein, 2 aa, Artificial sequence
  Synthetic peptide
RY

SEQ ID NO: 1370 - protein, 2 aa, Artificial sequence
  Synthetic peptide
YL

SEQ ID NO: 1371 - protein, 3 aa, Artificial sequence
  Synthetic peptide
AMK

SEQ ID NO: 1372 - protein, 3 aa, Artificial sequence
  Synthetic peptide
MKP

SEQ ID NO: 1373 - protein, 3 aa, Artificial sequence
  Synthetic peptide
KPW

SEQ ID NO: 1374 - protein, 3 aa, Artificial sequence
  Synthetic peptide
PWI

SEQ ID NO: 1375 - protein, 3 aa, Artificial sequence
  Synthetic peptide
WIQ

SEQ ID NO: 1376 - protein, 3 aa, Artificial sequence
  Synthetic peptide
IQP

SEQ ID NO: 1377 - protein, 3 aa, Artificial sequence
  Synthetic peptide
QPK

SEQ ID NO: 1378 - protein, 3 aa, Artificial sequence
  Synthetic peptide
PKT

SEQ ID NO: 1379 - protein, 3 aa, Artificial sequence
  Synthetic peptide
KTK

SEQ ID NO: 1380 - protein, 3 aa, Artificial sequence
  Synthetic peptide
TKV

SEQ ID NO: 1381 - protein, 3 aa, Artificial sequence
  Synthetic peptide
KVI

SEQ ID NO: 1382 - protein, 3 aa, Artificial sequence
  Synthetic peptide
VIP

SEQ ID NO: 1383 - protein, 3 aa, Artificial sequence
  Synthetic peptide
IPY

SEQ ID NO: 1384 - protein, 3 aa, Artificial sequence
  Synthetic peptide
PYV

SEQ ID NO: 1385 - protein, 3 aa, Artificial sequence
  Synthetic peptide
YVR

SEQ ID NO: 1386 - protein, 3 aa, Artificial sequence
  Synthetic peptide
VRY

SEQ ID NO: 1387 - protein, 3 aa, Artificial sequence
  Synthetic peptide
RYL

SEQ ID NO: 1388 - protein, 4 aa, Artificial sequence
  Synthetic peptide
AMKP

SEQ ID NO: 1389 - protein, 4 aa, Artificial sequence
  Synthetic peptide
MKPW

SEQ ID NO: 1390 - protein, 4 aa, Artificial sequence
  Synthetic peptide
KPWI

SEQ ID NO: 1391 - protein, 4 aa, Artificial sequence
  Synthetic peptide
PWIQ

SEQ ID NO: 1392 - protein, 4 aa, Artificial sequence
  Synthetic peptide
WIQP

SEQ ID NO: 1393 - protein, 4 aa, Artificial sequence
  Synthetic peptide
IQPK

SEQ ID NO: 1394 - protein, 4 aa, Artificial sequence
  Synthetic peptide
QPKT

SEQ ID NO: 1395 - protein, 4 aa, Artificial sequence
  Synthetic peptide
PKTK

SEQ ID NO: 1396 - protein, 4 aa, Artificial sequence
  Synthetic peptide
KTKV

SEQ ID NO: 1397 - protein, 4 aa, Artificial sequence
  Synthetic peptide
TKVI

SEQ ID NO: 1398 - protein, 4 aa, Artificial sequence
  Synthetic peptide
KVIP

SEQ ID NO: 1399 - protein, 4 aa, Artificial sequence
  Synthetic peptide
VIPY

SEQ ID NO: 1400 - protein, 4 aa, Artificial sequence
  Synthetic peptide
IPYV

SEQ ID NO: 1401 - protein, 4 aa, Artificial sequence
  Synthetic peptide
PYVR

SEQ ID NO: 1402 - protein, 4 aa, Artificial sequence
  Synthetic peptide
YVRY

SEQ ID NO: 1403 - protein, 4 aa, Artificial sequence
  Synthetic peptide
VRYL

SEQ ID NO: 1404 - protein, 5 aa, Artificial sequence
  Synthetic peptide
AMKPW

SEQ ID NO: 1405 - protein, 5 aa, Artificial sequence
  Synthetic peptide
MKPWI

SEQ ID NO: 1406 - protein, 5 aa, Artificial sequence
  Synthetic peptide
KPWIQ

SEQ ID NO: 1407 - protein, 5 aa, Artificial sequence
  Synthetic peptide
PWIQP

SEQ ID NO: 1408 - protein, 5 aa, Artificial sequence
  Synthetic peptide
WIQPK

SEQ ID NO: 1409 - protein, 5 aa, Artificial sequence
  Synthetic peptide
IQPKT

SEQ ID NO: 1410 - protein, 5 aa, Artificial sequence
  Synthetic peptide
QPKTK

SEQ ID NO: 1411 - protein, 5 aa, Artificial sequence
  Synthetic peptide
PKTKV

SEQ ID NO: 1412 - protein, 5 aa, Artificial sequence
  Synthetic peptide
KTKVI

SEQ ID NO: 1413 - protein, 5 aa, Artificial sequence
  Synthetic peptide
TKVIP

SEQ ID NO: 1414 - protein, 5 aa, Artificial sequence
  Synthetic peptide
KVIPY

SEQ ID NO: 1415 - protein, 5 aa, Artificial sequence
  Synthetic peptide
VIPYV

SEQ ID NO: 1416 - protein, 5 aa, Artificial sequence
  Synthetic peptide
IPYVR

SEQ ID NO: 1417 - protein, 5 aa, Artificial sequence
  Synthetic peptide
PYVRY

SEQ ID NO: 1418 - protein, 5 aa, Artificial sequence
  Synthetic peptide
YVRYL

SEQ ID NO: 1419 - protein, 6 aa, Artificial sequence
  Synthetic peptide
AMKPWI

SEQ ID NO: 1420 - protein, 6 aa, Artificial sequence
  Synthetic peptide
MKPWIQ

SEQ ID NO: 1421 - protein, 6 aa, Artificial sequence
  Synthetic peptide
KPWIQP

SEQ ID NO: 1422 - protein, 6 aa, Artificial sequence
  Synthetic peptide
PWIQPK

SEQ ID NO: 1423 - protein, 6 aa, Artificial sequence
  Synthetic peptide
WIQPKT

SEQ ID NO: 1424 - protein, 6 aa, Artificial sequence
  Synthetic peptide
IQPKTK

SEQ ID NO: 1425 - protein, 6 aa, Artificial sequence
  Synthetic peptide
QPKTKV

SEQ ID NO: 1426 - protein, 6 aa, Artificial sequence
  Synthetic peptide
PKTKVI

SEQ ID NO: 1427 - protein, 6 aa, Artificial sequence
  Synthetic peptide
KTKVIP

SEQ ID NO: 1428 - protein, 6 aa, Artificial sequence
  Synthetic peptide
TKVIPY

SEQ ID NO: 1429 - protein, 6 aa, Artificial sequence
  Synthetic peptide
KVIPYV

SEQ ID NO: 1430 - protein, 6 aa, Artificial sequence
  Synthetic peptide
VIPYVR

SEQ ID NO: 1431 - protein, 6 aa, Artificial sequence
  Synthetic peptide
IPYVRY

SEQ ID NO: 1432 - protein, 6 aa, Artificial sequence
  Synthetic peptide
PYVRYL

SEQ ID NO: 1433 - protein, 7 aa, Artificial sequence
  Synthetic peptide
AMKPWIQ

SEQ ID NO: 1434 - protein, 7 aa, Artificial sequence
  Synthetic peptide
MKPWIQP

SEQ ID NO: 1435 - protein, 7 aa, Artificial sequence
  Synthetic peptide
KPWIQPK

SEQ ID NO: 1436 - protein, 7 aa, Artificial sequence
  Synthetic peptide
PWIQPKT

SEQ ID NO: 1437 - protein, 7 aa, Artificial sequence
  Synthetic peptide
WIQPKTK

SEQ ID NO: 1438 - protein, 7 aa, Artificial sequence
  Synthetic peptide
IQPKTKV

SEQ ID NO: 1439 - protein, 7 aa, Artificial sequence
  Synthetic peptide
QPKTKVI

SEQ ID NO: 1440 - protein, 7 aa, Artificial sequence
  Synthetic peptide
PKTKVIP

SEQ ID NO: 1441 - protein, 7 aa, Artificial sequence
  Synthetic peptide
KTKVIPY

SEQ ID NO: 1442 - protein, 7 aa, Artificial sequence
  Synthetic peptide
TKVIPYV

SEQ ID NO: 1443 - protein, 7 aa, Artificial sequence
  Synthetic peptide
KVIPYVR

SEQ ID NO: 1444 - protein, 7 aa, Artificial sequence
  Synthetic peptide
VIPYVRY

SEQ ID NO: 1445 - protein, 7 aa, Artificial sequence
  Synthetic peptide
IPYVRYL

SEQ ID NO: 1446 - protein, 8 aa, Artificial sequence
  Synthetic peptide
AMKPWIQP

SEQ ID NO: 1447 - protein, 8 aa, Artificial sequence
  Synthetic peptide
MKPWIQPK

SEQ ID NO: 1448 - protein, 8 aa, Artificial sequence
  Synthetic peptide
KPWIQPKT

SEQ ID NO: 1449 - protein, 8 aa, Artificial sequence
  Synthetic peptide
PWIQPKTK

SEQ ID NO: 1450 - protein, 8 aa, Artificial sequence
  Synthetic peptide
WIQPKTKV

SEQ ID NO: 1451 - protein, 8 aa, Artificial sequence
  Synthetic peptide
IQPKTKVI

SEQ ID NO: 1452 - protein, 8 aa, Artificial sequence
  Synthetic peptide
QPKTKVIP

SEQ ID NO: 1453 - protein, 8 aa, Artificial sequence
  Synthetic peptide
PKTKVIPY

SEQ ID NO: 1454 - protein, 8 aa, Artificial sequence
  Synthetic peptide
KTKVIPYV

SEQ ID NO: 1455 - protein, 8 aa, Artificial sequence
  Synthetic peptide
TKVIPYVR

SEQ ID NO: 1456 - protein, 8 aa, Artificial sequence
  Synthetic peptide
KVIPYVRY

SEQ ID NO: 1457 - protein, 8 aa, Artificial sequence
  Synthetic peptide
VIPYVRYL

SEQ ID NO: 1458 - protein, 9 aa, Artificial sequence
  Synthetic peptide
AMKPWIQPK

SEQ ID NO: 1459 - protein, 9 aa, Artificial sequence
  Synthetic peptide
MKPWIQPKT

SEQ ID NO: 1460 - protein, 9 aa, Artificial sequence
  Synthetic peptide
KPWIQPKTK

SEQ ID NO: 1461 - protein, 9 aa, Artificial sequence
  Synthetic peptide
PWIQPKTKV

SEQ ID NO: 1462 - protein, 9 aa, Artificial sequence
  Synthetic peptide
WIQPKTKVI

SEQ ID NO: 1463 - protein, 9 aa, Artificial sequence
  Synthetic peptide
IQPKTKVIP

SEQ ID NO: 1464 - protein, 9 aa, Artificial sequence
  Synthetic peptide
QPKTKVIPY

SEQ ID NO: 1465 - protein, 9 aa, Artificial sequence
  Synthetic peptide
PKTKVIPYV

SEQ ID NO: 1466 - protein, 9 aa, Artificial sequence
  Synthetic peptide
KTKVIPYVR

SEQ ID NO: 1467 - protein, 9 aa, Artificial sequence
  Synthetic peptide
TKVIPYVRY

SEQ ID NO: 1468 - protein, 9 aa, Artificial sequence
  Synthetic peptide
KVIPYVRYL

SEQ ID NO: 1469 - protein, 10 aa, Artificial sequence
  Synthetic peptide
AMKPWIQPKT

SEQ ID NO: 1470 - protein, 10 aa, Artificial sequence
  Synthetic peptide
MKPWIQPKTK

SEQ ID NO: 1471 - protein, 10 aa, Artificial sequence
  Synthetic peptide
KPWIQPKTKV

SEQ ID NO: 1472 - protein, 10 aa, Artificial sequence
  Synthetic peptide
PWIQPKTKVI

SEQ ID NO: 1473 - protein, 10 aa, Artificial sequence
  Synthetic peptide
WIQPKTKVIP

SEQ ID NO: 1474 - protein, 10 aa, Artificial sequence
  Synthetic peptide
IQPKTKVIPY

SEQ ID NO: 1475 - protein, 10 aa, Artificial sequence
  Synthetic peptide
QPKTKVIPYV

SEQ ID NO: 1476 - protein, 10 aa, Artificial sequence
  Synthetic peptide
PKTKVIPYVR

SEQ ID NO: 1477 - protein, 10 aa, Artificial sequence
  Synthetic peptide
KTKVIPYVRY

SEQ ID NO: 1478 - protein, 10 aa, Artificial sequence
  Synthetic peptide
TKVIPYVRYL

SEQ ID NO: 1479 - protein, 11 aa, Artificial sequence
  Synthetic peptide
AMKPWIQPKTK

SEQ ID NO: 1480 - protein, 11 aa, Artificial sequence
  Synthetic peptide
MKPWIQPKTKV

SEQ ID NO: 1481 - protein, 11 aa, Artificial sequence
  Synthetic peptide
KPWIQPKTKVI

SEQ ID NO: 1482 - protein, 11 aa, Artificial sequence
  Synthetic peptide
PWIQPKTKVIP

SEQ ID NO: 1483 - protein, 11 aa, Artificial sequence
  Synthetic peptide
WIQPKTKVIPY

SEQ ID NO: 1484 - protein, 11 aa, Artificial sequence
  Synthetic peptide
IQPKTKVIPYV

SEQ ID NO: 1485 - protein, 11 aa, Artificial sequence
  Synthetic peptide
QPKTKVIPYVR

SEQ ID NO: 1486 - protein, 11 aa, Artificial sequence
  Synthetic peptide
PKTKVIPYVRY

SEQ ID NO: 1487 - protein, 11 aa, Artificial sequence
  Synthetic peptide
KTKVIPYVRYL

SEQ ID NO: 1488 - protein, 12 aa, Artificial sequence
  Synthetic peptide
AMKPWIQPKTKV

SEQ ID NO: 1489 - protein, 12 aa, Artificial sequence
  Synthetic peptide
MKPWIQPKTKVI

SEQ ID NO: 1490 - protein, 12 aa, Artificial sequence
  Synthetic peptide
KPWIQPKTKVIP

SEQ ID NO: 1491 - protein, 12 aa, Artificial sequence
  Synthetic peptide
PWIQPKTKVIPY

SEQ ID NO: 1492 - protein, 12 aa, Artificial sequence
  Synthetic peptide
WIQPKTKVIPYV

SEQ ID NO: 1493 - protein, 12 aa, Artificial sequence
  Synthetic peptide
IQPKTKVIPYVR

SEQ ID NO: 1494 - protein, 12 aa, Artificial sequence
  Synthetic peptide
QPKTKVIPYVRY

SEQ ID NO: 1495 - protein, 12 aa, Artificial sequence
  Synthetic peptide
PKTKVIPYVRYL

SEQ ID NO: 1496 - protein, 13 aa, Artificial sequence
  Synthetic peptide
AMKPWIQPKTKVI

SEQ ID NO: 1497 - protein, 13 aa, Artificial sequence
  Synthetic peptide
MKPWIQPKTKVIP

SEQ ID NO: 1498 - protein, 13 aa, Artificial sequence
  Synthetic peptide
KPWIQPKTKVIPY

SEQ ID NO: 1499 - protein, 13 aa, Artificial sequence
  Synthetic peptide
PWIQPKTKVIPYV

SEQ ID NO: 1500 - protein, 13 aa, Artificial sequence
  Synthetic peptide
WIQPKTKVIPYVR

SEQ ID NO: 1501 - protein, 13 aa, Artificial sequence
  Synthetic peptide
IQPKTKVIPYVRY

SEQ ID NO: 1502 - protein, 13 aa, Artificial sequence
  Synthetic peptide
QPKTKVIPYVRYL

SEQ ID NO: 1503 - protein, 14 aa, Artificial sequence
  Synthetic peptide
AMKPWIQPKTKVIP

SEQ ID NO: 1504 - protein, 14 aa, Artificial sequence
  Synthetic peptide
MKPWIQPKTKVIPY

SEQ ID NO: 1505 - protein, 14 aa, Artificial sequence
  Synthetic peptide
KPWIQPKTKVIPYV

SEQ ID NO: 1506 - protein, 14 aa, Artificial sequence
  Synthetic peptide
PWIQPKTKVIPYVR

SEQ ID NO: 1507 - protein, 14 aa, Artificial sequence
  Synthetic peptide
WIQPKTKVIPYVRY

SEQ ID NO: 1508 - protein, 14 aa, Artificial sequence
  Synthetic peptide
IQPKTKVIPYVRYL

SEQ ID NO: 1509 - protein, 15 aa, Artificial sequence
  Synthetic peptide
AMKPWIQPKTKVIPY

SEQ ID NO: 1510 - protein, 15 aa, Artificial sequence
  Synthetic peptide
MKPWIQPKTKVIPYV

SEQ ID NO: 1511 - protein, 15 aa, Artificial sequence
  Synthetic peptide
KPWIQPKTKVIPYVR

SEQ ID NO: 1512 - protein, 15 aa, Artificial sequence
  Synthetic peptide
PWIQPKTKVIPYVRY

SEQ ID NO: 1513 - protein, 15 aa, Artificial sequence
  Synthetic peptide
WIQPKTKVIPYVRYL

SEQ ID NO: 1514 - protein, 16 aa, Artificial sequence
  Synthetic peptide
AMKPWIQPKTKVIPYV

SEQ ID NO: 1515 - protein, 16 aa, Artificial sequence
  Synthetic peptide
MKPWIQPKTKVIPYVR

SEQ ID NO: 1516 - protein, 16 aa, Artificial sequence
  Synthetic peptide
KPWIQPKTKVIPYVRY

SEQ ID NO: 1517 - protein, 16 aa, Artificial sequence
  Synthetic peptide
PWIQPKTKVIPYVRYL

SEQ ID NO: 1518 - protein, 17 aa, Artificial sequence
  Synthetic peptide
AMKPWIQPKTKVIPYVR

SEQ ID NO: 1519 - protein, 17 aa, Artificial sequence
  Synthetic peptide
MKPWIQPKTKVIPYVRY

SEQ ID NO: 1520 - protein, 17 aa, Artificial sequence
  Synthetic peptide
KPWIQPKTKVIPYVRYL

SEQ ID NO: 1521 - protein, 18 aa, Artificial sequence
  Synthetic peptide
AMKPWIQPKTKVIPYVRY

SEQ ID NO: 1522 - protein, 18 aa, Artificial sequence
  Synthetic peptide
MKPWIQPKTKVIPYVRYL

SEQ ID NO: 1523 - protein, 19 aa, Artificial sequence
  Synthetic peptide
AMKPWIQPKTKVIPYVRYL

SEQ ID NO: 1524 - protein, 2 aa, Artificial sequence
  Synthetic peptide
MA

SEQ ID NO: 1525 - protein, 2 aa, Artificial sequence
  Synthetic peptide
AI

SEQ ID NO: 1526 - protein, 2 aa, Artificial sequence
  Synthetic peptide
IP

SEQ ID NO: 1527 - protein, 2 aa, Artificial sequence
  Synthetic peptide
PP

SEQ ID NO: 1528 - protein, 2 aa, Artificial sequence
  Synthetic peptide
PK

SEQ ID NO: 1529 - protein, 2 aa, Artificial sequence
  Synthetic peptide
KK

SEQ ID NO: 1530 - protein, 2 aa, Artificial sequence
  Synthetic peptide
KN

SEQ ID NO: 1531 - protein, 2 aa, Artificial sequence
  Synthetic peptide
NQ

SEQ ID NO: 1532 - protein, 2 aa, Artificial sequence
  Synthetic peptide
QD

SEQ ID NO: 1533 - protein, 2 aa, Artificial sequence
  Synthetic peptide
DK

SEQ ID NO: 1534 - protein, 2 aa, Artificial sequence
  Synthetic peptide
KT

SEQ ID NO: 1535 - protein, 2 aa, Artificial sequence
  Synthetic peptide
TE

SEQ ID NO: 1536 - protein, 2 aa, Artificial sequence
  Synthetic peptide
EI

SEQ ID NO: 1537 - protein, 2 aa, Artificial sequence
  Synthetic peptide
IP

SEQ ID NO: 1538 - protein, 2 aa, Artificial sequence
  Synthetic peptide
PT

SEQ ID NO: 1539 - protein, 2 aa, Artificial sequence
  Synthetic peptide
TI

SEQ ID NO: 1540 - protein, 2 aa, Artificial sequence
  Synthetic peptide
IN

SEQ ID NO: 1541 - protein, 2 aa, Artificial sequence
  Synthetic peptide
NT

SEQ ID NO: 1542 - protein, 2 aa, Artificial sequence
  Synthetic peptide
TI

SEQ ID NO: 1543 - protein, 2 aa, Artificial sequence
  Synthetic peptide
IA

SEQ ID NO: 1544 - protein, 2 aa, Artificial sequence
  Synthetic peptide
AS

SEQ ID NO: 1545 - protein, 2 aa, Artificial sequence
  Synthetic peptide
SG

SEQ ID NO: 1546 - protein, 2 aa, Artificial sequence
  Synthetic peptide
GE

SEQ ID NO: 1547 - protein, 2 aa, Artificial sequence
  Synthetic peptide
EP

SEQ ID NO: 1548 - protein, 2 aa, Artificial sequence
  Synthetic peptide
PT

SEQ ID NO: 1549 - protein, 2 aa, Artificial sequence
  Synthetic peptide
TS

SEQ ID NO: 1550 - protein, 2 aa, Artificial sequence
  Synthetic peptide
ST

SEQ ID NO: 1551 - protein, 2 aa, Artificial sequence
  Synthetic peptide
TP

SEQ ID NO: 1552 - protein, 2 aa, Artificial sequence
  Synthetic peptide
PT

SEQ ID NO: 1553 - protein, 2 aa, Artificial sequence
  Synthetic peptide
TT

SEQ ID NO: 1554 - protein, 2 aa, Artificial sequence
  Synthetic peptide
TE

SEQ ID NO: 1555 - protein, 2 aa, Artificial sequence
  Synthetic peptide
EA

SEQ ID NO: 1556 - protein, 2 aa, Artificial sequence
  Synthetic peptide
AV

SEQ ID NO: 1557 - protein, 2 aa, Artificial sequence
  Synthetic peptide
VE

SEQ ID NO: 1558 - protein, 2 aa, Artificial sequence
  Synthetic peptide
ES

SEQ ID NO: 1559 - protein, 2 aa, Artificial sequence
  Synthetic peptide
ST

SEQ ID NO: 1560 - protein, 2 aa, Artificial sequence
  Synthetic peptide
TV

SEQ ID NO: 1561 - protein, 2 aa, Artificial sequence
  Synthetic peptide
VA

SEQ ID NO: 1562 - protein, 2 aa, Artificial sequence
  Synthetic peptide
AT

SEQ ID NO: 1563 - protein, 2 aa, Artificial sequence
  Synthetic peptide
TL

SEQ ID NO: 1564 - protein, 2 aa, Artificial sequence
  Synthetic peptide
LE

SEQ ID NO: 1565 - protein, 2 aa, Artificial sequence
  Synthetic peptide
ED

SEQ ID NO: 1566 - protein, 2 aa, Artificial sequence
  Synthetic peptide
DS

SEQ ID NO: 1567 - protein, 2 aa, Artificial sequence
  Synthetic peptide
SP

SEQ ID NO: 1568 - protein, 2 aa, Artificial sequence
  Synthetic peptide
PE

SEQ ID NO: 1569 - protein, 2 aa, Artificial sequence
  Synthetic peptide
EV

SEQ ID NO: 1570 - protein, 2 aa, Artificial sequence
  Synthetic peptide
VI

SEQ ID NO: 1571 - protein, 2 aa, Artificial sequence
  Synthetic peptide
IE

SEQ ID NO: 1572 - protein, 2 aa, Artificial sequence
  Synthetic peptide
ES

SEQ ID NO: 1573 - protein, 2 aa, Artificial sequence
  Synthetic peptide
SP

SEQ ID NO: 1574 - protein, 2 aa, Artificial sequence
  Synthetic peptide
PP

SEQ ID NO: 1575 - protein, 2 aa, Artificial sequence
  Synthetic peptide
PE

SEQ ID NO: 1576 - protein, 2 aa, Artificial sequence
  Synthetic peptide
EI

SEQ ID NO: 1577 - protein, 2 aa, Artificial sequence
  Synthetic peptide
IN

SEQ ID NO: 1578 - protein, 2 aa, Artificial sequence
  Synthetic peptide
NT

SEQ ID NO: 1579 - protein, 2 aa, Artificial sequence
  Synthetic peptide
TV

SEQ ID NO: 1580 - protein, 2 aa, Artificial sequence
  Synthetic peptide
VQ

SEQ ID NO: 1581 - protein, 2 aa, Artificial sequence
  Synthetic peptide
QV

SEQ ID NO: 1582 - protein, 2 aa, Artificial sequence
  Synthetic peptide
VT

SEQ ID NO: 1583 - protein, 2 aa, Artificial sequence
  Synthetic peptide
TS

SEQ ID NO: 1584 - protein, 2 aa, Artificial sequence
  Synthetic peptide
ST

SEQ ID NO: 1585 - protein, 2 aa, Artificial sequence
  Synthetic peptide
TA

SEQ ID NO: 1586 - protein, 2 aa, Artificial sequence
  Synthetic peptide
AV

SEQ ID NO: 1587 - protein, 3 aa, Artificial sequence
  Synthetic peptide
MAI

SEQ ID NO: 1588 - protein, 3 aa, Artificial sequence
  Synthetic peptide
AIP

SEQ ID NO: 1589 - protein, 3 aa, Artificial sequence
  Synthetic peptide
IPP

SEQ ID NO: 1590 - protein, 3 aa, Artificial sequence
  Synthetic peptide
PPK

SEQ ID NO: 1591 - protein, 3 aa, Artificial sequence
  Synthetic peptide
PKK

SEQ ID NO: 1592 - protein, 3 aa, Artificial sequence
  Synthetic peptide
KKN

SEQ ID NO: 1593 - protein, 3 aa, Artificial sequence
  Synthetic peptide
KNQ

SEQ ID NO: 1594 - protein, 3 aa, Artificial sequence
  Synthetic peptide
NQD

SEQ ID NO: 1595 - protein, 3 aa, Artificial sequence
  Synthetic peptide
QDK

SEQ ID NO: 1596 - protein, 3 aa, Artificial sequence
  Synthetic peptide
DKT

SEQ ID NO: 1597 - protein, 3 aa, Artificial sequence
  Synthetic peptide
KTE

SEQ ID NO: 1598 - protein, 3 aa, Artificial sequence
  Synthetic peptide
TEI

SEQ ID NO: 1599 - protein, 3 aa, Artificial sequence
  Synthetic peptide
EIP

SEQ ID NO: 1600 - protein, 3 aa, Artificial sequence
  Synthetic peptide
IPT

SEQ ID NO: 1601 - protein, 3 aa, Artificial sequence
  Synthetic peptide
PTI

SEQ ID NO: 1602 - protein, 3 aa, Artificial sequence
  Synthetic peptide
TIN

SEQ ID NO: 1603 - protein, 3 aa, Artificial sequence
  Synthetic peptide
INT

SEQ ID NO: 1604 - protein, 3 aa, Artificial sequence
  Synthetic peptide
NTI

SEQ ID NO: 1605 - protein, 3 aa, Artificial sequence
  Synthetic peptide
TIA

SEQ ID NO: 1606 - protein, 3 aa, Artificial sequence
  Synthetic peptide
IAS

SEQ ID NO: 1607 - protein, 3 aa, Artificial sequence
  Synthetic peptide
ASG

SEQ ID NO: 1608 - protein, 3 aa, Artificial sequence
  Synthetic peptide
SGE

SEQ ID NO: 1609 - protein, 3 aa, Artificial sequence
  Synthetic peptide
GEP

SEQ ID NO: 1610 - protein, 3 aa, Artificial sequence
  Synthetic peptide
EPT

SEQ ID NO: 1611 - protein, 3 aa, Artificial sequence
  Synthetic peptide
PTS

SEQ ID NO: 1612 - protein, 3 aa, Artificial sequence
  Synthetic peptide
TST

SEQ ID NO: 1613 - protein, 3 aa, Artificial sequence
  Synthetic peptide
STP

SEQ ID NO: 1614 - protein, 3 aa, Artificial sequence
  Synthetic peptide
TPT

SEQ ID NO: 1615 - protein, 3 aa, Artificial sequence
  Synthetic peptide
PTT

SEQ ID NO: 1616 - protein, 3 aa, Artificial sequence
  Synthetic peptide
TTE

SEQ ID NO: 1617 - protein, 3 aa, Artificial sequence
  Synthetic peptide
TEA

SEQ ID NO: 1618 - protein, 3 aa, Artificial sequence
  Synthetic peptide
EAV

SEQ ID NO: 1619 - protein, 3 aa, Artificial sequence
  Synthetic peptide
AVE

SEQ ID NO: 1620 - protein, 3 aa, Artificial sequence
  Synthetic peptide
VES

SEQ ID NO: 1621 - protein, 3 aa, Artificial sequence
  Synthetic peptide
EST

SEQ ID NO: 1622 - protein, 3 aa, Artificial sequence
  Synthetic peptide
STV

SEQ ID NO: 1623 - protein, 3 aa, Artificial sequence
  Synthetic peptide
TVA

SEQ ID NO: 1624 - protein, 3 aa, Artificial sequence
  Synthetic peptide
VAT

SEQ ID NO: 1625 - protein, 3 aa, Artificial sequence
  Synthetic peptide
ATL

SEQ ID NO: 1626 - protein, 3 aa, Artificial sequence
  Synthetic peptide
TLE

SEQ ID NO: 1627 - protein, 3 aa, Artificial sequence
  Synthetic peptide
LED

SEQ ID NO: 1628 - protein, 3 aa, Artificial sequence
  Synthetic peptide
EDS

SEQ ID NO: 1629 - protein, 3 aa, Artificial sequence
  Synthetic peptide
DSP

SEQ ID NO: 1630 - protein, 3 aa, Artificial sequence
  Synthetic peptide
SPE

SEQ ID NO: 1631 - protein, 3 aa, Artificial sequence
  Synthetic peptide
PEV

SEQ ID NO: 1632 - protein, 3 aa, Artificial sequence
  Synthetic peptide
EVI

SEQ ID NO: 1633 - protein, 3 aa, Artificial sequence
  Synthetic peptide
VIE

SEQ ID NO: 1634 - protein, 3 aa, Artificial sequence
  Synthetic peptide
IES

SEQ ID NO: 1635 - protein, 3 aa, Artificial sequence
  Synthetic peptide
ESP

SEQ ID NO: 1636 - protein, 3 aa, Artificial sequence
  Synthetic peptide
SPP

SEQ ID NO: 1637 - protein, 3 aa, Artificial sequence
  Synthetic peptide
PPE

SEQ ID NO: 1638 - protein, 3 aa, Artificial sequence
  Synthetic peptide
PEI

SEQ ID NO: 1639 - protein, 3 aa, Artificial sequence
  Synthetic peptide
EIN

SEQ ID NO: 1640 - protein, 3 aa, Artificial sequence
  Synthetic peptide
INT

SEQ ID NO: 1641 - protein, 3 aa, Artificial sequence
  Synthetic peptide
NTV

SEQ ID NO: 1642 - protein, 3 aa, Artificial sequence
  Synthetic peptide
TVQ

SEQ ID NO: 1643 - protein, 3 aa, Artificial sequence
  Synthetic peptide
VQV

SEQ ID NO: 1644 - protein, 3 aa, Artificial sequence
  Synthetic peptide
QVT

SEQ ID NO: 1645 - protein, 3 aa, Artificial sequence
  Synthetic peptide
VTS

SEQ ID NO: 1646 - protein, 3 aa, Artificial sequence
  Synthetic peptide
TST

SEQ ID NO: 1647 - protein, 3 aa, Artificial sequence
  Synthetic peptide
STA

SEQ ID NO: 1648 - protein, 3 aa, Artificial sequence
  Synthetic peptide
TAV

SEQ ID NO: 1649 - protein, 4 aa, Artificial sequence
  Synthetic peptide
MAIP

SEQ ID NO: 1650 - protein, 4 aa, Artificial sequence
  Synthetic peptide
AIPP

SEQ ID NO: 1651 - protein, 4 aa, Artificial sequence
  Synthetic peptide
IPPK

SEQ ID NO: 1652 - protein, 4 aa, Artificial sequence
  Synthetic peptide
PPKK

SEQ ID NO: 1653 - protein, 4 aa, Artificial sequence
  Synthetic peptide
PKKN

SEQ ID NO: 1654 - protein, 4 aa, Artificial sequence
  Synthetic peptide
KKNQ

SEQ ID NO: 1655 - protein, 4 aa, Artificial sequence
  Synthetic peptide
KNQD

SEQ ID NO: 1656 - protein, 4 aa, Artificial sequence
  Synthetic peptide
NQDK

SEQ ID NO: 1657 - protein, 4 aa, Artificial sequence
  Synthetic peptide
QDKT

SEQ ID NO: 1658 - protein, 4 aa, Artificial sequence
  Synthetic peptide
DKTE

SEQ ID NO: 1659 - protein, 4 aa, Artificial sequence
  Synthetic peptide
KTEI

SEQ ID NO: 1660 - protein, 4 aa, Artificial sequence
  Synthetic peptide
TEIP

SEQ ID NO: 1661 - protein, 4 aa, Artificial sequence
  Synthetic peptide
EIPT

SEQ ID NO: 1662 - protein, 4 aa, Artificial sequence
  Synthetic peptide
IPTI

SEQ ID NO: 1663 - protein, 4 aa, Artificial sequence
  Synthetic peptide
PTIN

SEQ ID NO: 1664 - protein, 4 aa, Artificial sequence
  Synthetic peptide
TINT

SEQ ID NO: 1665 - protein, 4 aa, Artificial sequence
  Synthetic peptide
INTI

SEQ ID NO: 1666 - protein, 4 aa, Artificial sequence
  Synthetic peptide
NTIA

SEQ ID NO: 1667 - protein, 4 aa, Artificial sequence
  Synthetic peptide
TIAS

SEQ ID NO: 1668 - protein, 4 aa, Artificial sequence
  Synthetic peptide
IASG

SEQ ID NO: 1669 - protein, 4 aa, Artificial sequence
  Synthetic peptide
ASGE

SEQ ID NO: 1670 - protein, 4 aa, Artificial sequence
  Synthetic peptide
SGEP

SEQ ID NO: 1671 - protein, 4 aa, Artificial sequence
  Synthetic peptide
GEPT

SEQ ID NO: 1672 - protein, 4 aa, Artificial sequence
  Synthetic peptide
EPTS

SEQ ID NO: 1673 - protein, 4 aa, Artificial sequence
  Synthetic peptide
PTST

SEQ ID NO: 1674 - protein, 4 aa, Artificial sequence
  Synthetic peptide
TSTP

SEQ ID NO: 1675 - protein, 4 aa, Artificial sequence
  Synthetic peptide
STPT

SEQ ID NO: 1676 - protein, 4 aa, Artificial sequence
  Synthetic peptide
TPTT

SEQ ID NO: 1677 - protein, 4 aa, Artificial sequence
  Synthetic peptide
PTTE

SEQ ID NO: 1678 - protein, 4 aa, Artificial sequence
  Synthetic peptide
TTEA

SEQ ID NO: 1679 - protein, 4 aa, Artificial sequence
  Synthetic peptide
TEAV

SEQ ID NO: 1680 - protein, 4 aa, Artificial sequence
  Synthetic peptide
EAVE

SEQ ID NO: 1681 - protein, 4 aa, Artificial sequence
  Synthetic peptide
AVES

SEQ ID NO: 1682 - protein, 4 aa, Artificial sequence
  Synthetic peptide
VEST

SEQ ID NO: 1683 - protein, 4 aa, Artificial sequence
  Synthetic peptide
ESTV

SEQ ID NO: 1684 - protein, 4 aa, Artificial sequence
  Synthetic peptide
STVA

SEQ ID NO: 1685 - protein, 4 aa, Artificial sequence
  Synthetic peptide
TVAT

SEQ ID NO: 1686 - protein, 4 aa, Artificial sequence
  Synthetic peptide
VATL

SEQ ID NO: 1687 - protein, 4 aa, Artificial sequence
  Synthetic peptide
ATLE

SEQ ID NO: 1688 - protein, 4 aa, Artificial sequence
  Synthetic peptide
TLED

SEQ ID NO: 1689 - protein, 4 aa, Artificial sequence
  Synthetic peptide
LEDS

SEQ ID NO: 1690 - protein, 4 aa, Artificial sequence
  Synthetic peptide
EDSP

SEQ ID NO: 1691 - protein, 4 aa, Artificial sequence
  Synthetic peptide
DSPE

SEQ ID NO: 1692 - protein, 4 aa, Artificial sequence
  Synthetic peptide
SPEV

SEQ ID NO: 1693 - protein, 4 aa, Artificial sequence
  Synthetic peptide
PEVI

SEQ ID NO: 1694 - protein, 4 aa, Artificial sequence
  Synthetic peptide
EVIE

SEQ ID NO: 1695 - protein, 4 aa, Artificial sequence
  Synthetic peptide
VIES

SEQ ID NO: 1696 - protein, 4 aa, Artificial sequence
  Synthetic peptide
IESP

SEQ ID NO: 1697 - protein, 4 aa, Artificial sequence
  Synthetic peptide
ESPP

SEQ ID NO: 1698 - protein, 4 aa, Artificial sequence
  Synthetic peptide
SPPE

SEQ ID NO: 1699 - protein, 4 aa, Artificial sequence
  Synthetic peptide
PPEI

SEQ ID NO: 1700 - protein, 4 aa, Artificial sequence
  Synthetic peptide
PEIN

SEQ ID NO: 1701 - protein, 4 aa, Artificial sequence
  Synthetic peptide
EINT

SEQ ID NO: 1702 - protein, 4 aa, Artificial sequence
  Synthetic peptide
INTV

SEQ ID NO: 1703 - protein, 4 aa, Artificial sequence
  Synthetic peptide
NTVQ

SEQ ID NO: 1704 - protein, 4 aa, Artificial sequence
  Synthetic peptide
TVQV

SEQ ID NO: 1705 - protein, 4 aa, Artificial sequence
  Synthetic peptide
VQVT

SEQ ID NO: 1706 - protein, 4 aa, Artificial sequence
  Synthetic peptide
QVTS

SEQ ID NO: 1707 - protein, 4 aa, Artificial sequence
  Synthetic peptide
VTST

SEQ ID NO: 1708 - protein, 4 aa, Artificial sequence
  Synthetic peptide
TSTA

SEQ ID NO: 1709 - protein, 4 aa, Artificial sequence
  Synthetic peptide
STAV

SEQ ID NO: 1710 - protein, 5 aa, Artificial sequence
  Synthetic peptide
MAIPP

SEQ ID NO: 1711 - protein, 5 aa, Artificial sequence
  Synthetic peptide
AIPPK

SEQ ID NO: 1712 - protein, 5 aa, Artificial sequence
  Synthetic peptide
IPPKK

SEQ ID NO: 1713 - protein, 5 aa, Artificial sequence
  Synthetic peptide
PPKKN

SEQ ID NO: 1714 - protein, 5 aa, Artificial sequence
  Synthetic peptide
PKKNQ

SEQ ID NO: 1715 - protein, 5 aa, Artificial sequence
  Synthetic peptide
KKNQD

SEQ ID NO: 1716 - protein, 5 aa, Artificial sequence
  Synthetic peptide
KNQDK

SEQ ID NO: 1717 - protein, 5 aa, Artificial sequence
  Synthetic peptide
NQDKT

SEQ ID NO: 1718 - protein, 5 aa, Artificial sequence
  Synthetic peptide
QDKTE

SEQ ID NO: 1719 - protein, 5 aa, Artificial sequence
  Synthetic peptide
DKTEI

SEQ ID NO: 1720 - protein, 5 aa, Artificial sequence
  Synthetic peptide
KTEIP

SEQ ID NO: 1721 - protein, 5 aa, Artificial sequence
  Synthetic peptide
TEIPT

SEQ ID NO: 1722 - protein, 5 aa, Artificial sequence
  Synthetic peptide
EIPTI

SEQ ID NO: 1723 - protein, 5 aa, Artificial sequence
  Synthetic peptide
IPTIN

SEQ ID NO: 1724 - protein, 5 aa, Artificial sequence
  Synthetic peptide
PTINT

SEQ ID NO: 1725 - protein, 5 aa, Artificial sequence
  Synthetic peptide
TINTI

SEQ ID NO: 1726 - protein, 5 aa, Artificial sequence
  Synthetic peptide
INTIA

SEQ ID NO: 1727 - protein, 5 aa, Artificial sequence
  Synthetic peptide
NTIAS

SEQ ID NO: 1728 - protein, 5 aa, Artificial sequence
  Synthetic peptide
TIASG

SEQ ID NO: 1729 - protein, 5 aa, Artificial sequence
  Synthetic peptide
IASGE

SEQ ID NO: 1730 - protein, 5 aa, Artificial sequence
  Synthetic peptide
ASGEP

SEQ ID NO: 1731 - protein, 5 aa, Artificial sequence
  Synthetic peptide
SGEPT

SEQ ID NO: 1732 - protein, 5 aa, Artificial sequence
  Synthetic peptide
GEPTS

SEQ ID NO: 1733 - protein, 5 aa, Artificial sequence
  Synthetic peptide
EPTST

SEQ ID NO: 1734 - protein, 5 aa, Artificial sequence
  Synthetic peptide
PTSTP

SEQ ID NO: 1735 - protein, 5 aa, Artificial sequence
  Synthetic peptide
TSTPT

SEQ ID NO: 1736 - protein, 5 aa, Artificial sequence
  Synthetic peptide
STPTT

SEQ ID NO: 1737 - protein, 5 aa, Artificial sequence
  Synthetic peptide
TPTTE

SEQ ID NO: 1738 - protein, 5 aa, Artificial sequence
  Synthetic peptide
PTTEA

SEQ ID NO: 1739 - protein, 5 aa, Artificial sequence
  Synthetic peptide
TTEAV

SEQ ID NO: 1740 - protein, 5 aa, Artificial sequence
  Synthetic peptide
TEAVE

SEQ ID NO: 1741 - protein, 5 aa, Artificial sequence
  Synthetic peptide
EAVES

SEQ ID NO: 1742 - protein, 5 aa, Artificial sequence
  Synthetic peptide
AVEST

SEQ ID NO: 1743 - protein, 5 aa, Artificial sequence
  Synthetic peptide
VESTV

SEQ ID NO: 1744 - protein, 5 aa, Artificial sequence
  Synthetic peptide
ESTVA

SEQ ID NO: 1745 - protein, 5 aa, Artificial sequence
  Synthetic peptide
STVAT

SEQ ID NO: 1746 - protein, 5 aa, Artificial sequence
  Synthetic peptide
TVATL

SEQ ID NO: 1747 - protein, 5 aa, Artificial sequence
  Synthetic peptide
VATLE

SEQ ID NO: 1748 - protein, 5 aa, Artificial sequence
  Synthetic peptide
ATLED

SEQ ID NO: 1749 - protein, 5 aa, Artificial sequence
  Synthetic peptide
TLEDS

SEQ ID NO: 1750 - protein, 5 aa, Artificial sequence
  Synthetic peptide
LEDSP

SEQ ID NO: 1751 - protein, 5 aa, Artificial sequence
  Synthetic peptide
EDSPE

SEQ ID NO: 1752 - protein, 5 aa, Artificial sequence
  Synthetic peptide
DSPEV

SEQ ID NO: 1753 - protein, 5 aa, Artificial sequence
  Synthetic peptide
SPEVI

SEQ ID NO: 1754 - protein, 5 aa, Artificial sequence
  Synthetic peptide
PEVIE

SEQ ID NO: 1755 - protein, 5 aa, Artificial sequence
  Synthetic peptide
EVIES

SEQ ID NO: 1756 - protein, 5 aa, Artificial sequence
  Synthetic peptide
VIESP

SEQ ID NO: 1757 - protein, 5 aa, Artificial sequence
  Synthetic peptide
IESPP

SEQ ID NO: 1758 - protein, 5 aa, Artificial sequence
  Synthetic peptide
ESPPE

SEQ ID NO: 1759 - protein, 5 aa, Artificial sequence
  Synthetic peptide
SPPEI

SEQ ID NO: 1760 - protein, 5 aa, Artificial sequence
  Synthetic peptide
PPEIN

SEQ ID NO: 1761 - protein, 5 aa, Artificial sequence
  Synthetic peptide
PEINT

SEQ ID NO: 1762 - protein, 5 aa, Artificial sequence
  Synthetic peptide
EINTV

SEQ ID NO: 1763 - protein, 5 aa, Artificial sequence
  Synthetic peptide
INTVQ

SEQ ID NO: 1764 - protein, 5 aa, Artificial sequence
  Synthetic peptide
NTVQV

SEQ ID NO: 1765 - protein, 5 aa, Artificial sequence
  Synthetic peptide
TVQVT

SEQ ID NO: 1766 - protein, 5 aa, Artificial sequence
  Synthetic peptide
VQVTS

SEQ ID NO: 1767 - protein, 5 aa, Artificial sequence
  Synthetic peptide
QVTST

SEQ ID NO: 1768 - protein, 5 aa, Artificial sequence
  Synthetic peptide
VTSTA

SEQ ID NO: 1769 - protein, 5 aa, Artificial sequence
  Synthetic peptide
TSTAV

SEQ ID NO: 1770 - protein, 6 aa, Artificial sequence
  Synthetic peptide
MAIPPK

SEQ ID NO: 1771 - protein, 6 aa, Artificial sequence
  Synthetic peptide
AIPPKK

SEQ ID NO: 1772 - protein, 6 aa, Artificial sequence
  Synthetic peptide
IPPKKN

SEQ ID NO: 1773 - protein, 6 aa, Artificial sequence
  Synthetic peptide
PPKKNQ

SEQ ID NO: 1774 - protein, 6 aa, Artificial sequence
  Synthetic peptide
PKKNQD

SEQ ID NO: 1775 - protein, 6 aa, Artificial sequence
  Synthetic peptide
KKNQDK

SEQ ID NO: 1776 - protein, 6 aa, Artificial sequence
  Synthetic peptide
KNQDKT

SEQ ID NO: 1777 - protein, 6 aa, Artificial sequence
  Synthetic peptide
NQDKTE

SEQ ID NO: 1778 - protein, 6 aa, Artificial sequence
  Synthetic peptide
QDKTEI

SEQ ID NO: 1779 - protein, 6 aa, Artificial sequence
  Synthetic peptide
DKTEIP

SEQ ID NO: 1780 - protein, 6 aa, Artificial sequence
  Synthetic peptide
KTEIPT

SEQ ID NO: 1781 - protein, 6 aa, Artificial sequence
  Synthetic peptide
TEIPTI

SEQ ID NO: 1782 - protein, 6 aa, Artificial sequence
  Synthetic peptide
EIPTIN

SEQ ID NO: 1783 - protein, 6 aa, Artificial sequence
  Synthetic peptide
IPTINT

SEQ ID NO: 1784 - protein, 6 aa, Artificial sequence
  Synthetic peptide
PTINTI

SEQ ID NO: 1785 - protein, 6 aa, Artificial sequence
  Synthetic peptide
TINTIA

SEQ ID NO: 1786 - protein, 6 aa, Artificial sequence
  Synthetic peptide
INTIAS

SEQ ID NO: 1787 - protein, 6 aa, Artificial sequence
  Synthetic peptide
NTIASG

SEQ ID NO: 1788 - protein, 6 aa, Artificial sequence
  Synthetic peptide
TIASGE

SEQ ID NO: 1789 - protein, 6 aa, Artificial sequence
  Synthetic peptide
IASGEP

SEQ ID NO: 1790 - protein, 6 aa, Artificial sequence
  Synthetic peptide
ASGEPT

SEQ ID NO: 1791 - protein, 6 aa, Artificial sequence
  Synthetic peptide
SGEPTS

SEQ ID NO: 1792 - protein, 6 aa, Artificial sequence
  Synthetic peptide
GEPTST

SEQ ID NO: 1793 - protein, 6 aa, Artificial sequence
  Synthetic peptide
EPTSTP

SEQ ID NO: 1794 - protein, 6 aa, Artificial sequence
  Synthetic peptide
PTSTPT

SEQ ID NO: 1795 - protein, 6 aa, Artificial sequence
  Synthetic peptide
TSTPTT

SEQ ID NO: 1796 - protein, 6 aa, Artificial sequence
  Synthetic peptide
STPTTE

SEQ ID NO: 1797 - protein, 6 aa, Artificial sequence
  Synthetic peptide
TPTTEA

SEQ ID NO: 1798 - protein, 6 aa, Artificial sequence
  Synthetic peptide
PTTEAV

SEQ ID NO: 1799 - protein, 6 aa, Artificial sequence
  Synthetic peptide
TTEAVE

SEQ ID NO: 1800 - protein, 6 aa, Artificial sequence
  Synthetic peptide
TEAVES

SEQ ID NO: 1801 - protein, 6 aa, Artificial sequence
  Synthetic peptide
EAVEST

SEQ ID NO: 1802 - protein, 6 aa, Artificial sequence
  Synthetic peptide
AVESTV

SEQ ID NO: 1803 - protein, 6 aa, Artificial sequence
  Synthetic peptide
VESTVA

SEQ ID NO: 1804 - protein, 6 aa, Artificial sequence
  Synthetic peptide
ESTVAT

SEQ ID NO: 1805 - protein, 6 aa, Artificial sequence
  Synthetic peptide
STVATL

SEQ ID NO: 1806 - protein, 6 aa, Artificial sequence
  Synthetic peptide
TVATLE

SEQ ID NO: 1807 - protein, 6 aa, Artificial sequence
  Synthetic peptide
VATLED

SEQ ID NO: 1808 - protein, 6 aa, Artificial sequence
  Synthetic peptide
ATLEDS

SEQ ID NO: 1809 - protein, 6 aa, Artificial sequence
  Synthetic peptide
TLEDSP

SEQ ID NO: 1810 - protein, 6 aa, Artificial sequence
  Synthetic peptide
LEDSPE

SEQ ID NO: 1811 - protein, 6 aa, Artificial sequence
  Synthetic peptide
EDSPEV

SEQ ID NO: 1812 - protein, 6 aa, Artificial sequence
  Synthetic peptide
DSPEVI

SEQ ID NO: 1813 - protein, 6 aa, Artificial sequence
  Synthetic peptide
SPEVIE

SEQ ID NO: 1814 - protein, 6 aa, Artificial sequence
  Synthetic peptide
PEVIES

SEQ ID NO: 1815 - protein, 6 aa, Artificial sequence
  Synthetic peptide
EVIESP

SEQ ID NO: 1816 - protein, 6 aa, Artificial sequence
  Synthetic peptide
VIESPP

SEQ ID NO: 1817 - protein, 6 aa, Artificial sequence
  Synthetic peptide
IESPPE

SEQ ID NO: 1818 - protein, 6 aa, Artificial sequence
  Synthetic peptide
ESPPEI

SEQ ID NO: 1819 - protein, 6 aa, Artificial sequence
  Synthetic peptide
SPPEIN

SEQ ID NO: 1820 - protein, 6 aa, Artificial sequence
  Synthetic peptide
PPEINT

SEQ ID NO: 1821 - protein, 6 aa, Artificial sequence
  Synthetic peptide
PEINTV

SEQ ID NO: 1822 - protein, 6 aa, Artificial sequence
  Synthetic peptide
EINTVQ

SEQ ID NO: 1823 - protein, 6 aa, Artificial sequence
  Synthetic peptide
INTVQV

SEQ ID NO: 1824 - protein, 6 aa, Artificial sequence
  Synthetic peptide
NTVQVT

SEQ ID NO: 1825 - protein, 6 aa, Artificial sequence
  Synthetic peptide
TVQVTS

SEQ ID NO: 1826 - protein, 6 aa, Artificial sequence
  Synthetic peptide
VQVTST

SEQ ID NO: 1827 - protein, 6 aa, Artificial sequence
  Synthetic peptide
QVTSTA

SEQ ID NO: 1828 - protein, 6 aa, Artificial sequence
  Synthetic peptide
VTSTAV

SEQ ID NO: 1829 - protein, 7 aa, Artificial sequence
  Synthetic peptide
MAIPPKK

SEQ ID NO: 1830 - protein, 7 aa, Artificial sequence
  Synthetic peptide
AIPPKKN

SEQ ID NO: 1831 - protein, 7 aa, Artificial sequence
  Synthetic peptide
IPPKKNQ

SEQ ID NO: 1832 - protein, 7 aa, Artificial sequence
  Synthetic peptide
PPKKNQD

SEQ ID NO: 1833 - protein, 7 aa, Artificial sequence
  Synthetic peptide
PKKNQDK

SEQ ID NO: 1834 - protein, 7 aa, Artificial sequence
  Synthetic peptide
KKNQDKT

SEQ ID NO: 1835 - protein, 7 aa, Artificial sequence
  Synthetic peptide
KNQDKTE

SEQ ID NO: 1836 - protein, 7 aa, Artificial sequence
  Synthetic peptide
NQDKTEI

SEQ ID NO: 1837 - protein, 7 aa, Artificial sequence
  Synthetic peptide
QDKTEIP

SEQ ID NO: 1838 - protein, 7 aa, Artificial sequence
  Synthetic peptide
DKTEIPT

SEQ ID NO: 1839 - protein, 7 aa, Artificial sequence
  Synthetic peptide
KTEIPTI

SEQ ID NO: 1840 - protein, 7 aa, Artificial sequence
  Synthetic peptide
TEIPTIN

SEQ ID NO: 1841 - protein, 7 aa, Artificial sequence
  Synthetic peptide
EIPTINT

SEQ ID NO: 1842 - protein, 7 aa, Artificial sequence
  Synthetic peptide
IPTINTI

SEQ ID NO: 1843 - protein, 7 aa, Artificial sequence
  Synthetic peptide
PTINTIA

SEQ ID NO: 1844 - protein, 7 aa, Artificial sequence
  Synthetic peptide
TINTIAS

SEQ ID NO: 1845 - protein, 7 aa, Artificial sequence
  Synthetic peptide
INTIASG

SEQ ID NO: 1846 - protein, 7 aa, Artificial sequence
  Synthetic peptide
NTIASGE

SEQ ID NO: 1847 - protein, 7 aa, Artificial sequence
  Synthetic peptide
TIASGEP

SEQ ID NO: 1848 - protein, 7 aa, Artificial sequence
  Synthetic peptide
IASGEPT

SEQ ID NO: 1849 - protein, 7 aa, Artificial sequence
  Synthetic peptide
ASGEPTS

SEQ ID NO: 1850 - protein, 7 aa, Artificial sequence
  Synthetic peptide
SGEPTST

SEQ ID NO: 1851 - protein, 7 aa, Artificial sequence
  Synthetic peptide
GEPTSTP

SEQ ID NO: 1852 - protein, 7 aa, Artificial sequence
  Synthetic peptide
EPTSTPT

SEQ ID NO: 1853 - protein, 7 aa, Artificial sequence
  Synthetic peptide
PTSTPTT

SEQ ID NO: 1854 - protein, 7 aa, Artificial sequence
  Synthetic peptide
TSTPTTE

SEQ ID NO: 1855 - protein, 7 aa, Artificial sequence
  Synthetic peptide
STPTTEA

SEQ ID NO: 1856 - protein, 7 aa, Artificial sequence
  Synthetic peptide
TPTTEAV

SEQ ID NO: 1857 - protein, 7 aa, Artificial sequence
  Synthetic peptide
PTTEAVE

SEQ ID NO: 1858 - protein, 7 aa, Artificial sequence
  Synthetic peptide
TTEAVES

SEQ ID NO: 1859 - protein, 7 aa, Artificial sequence
  Synthetic peptide
TEAVEST

SEQ ID NO: 1860 - protein, 7 aa, Artificial sequence
  Synthetic peptide
EAVESTV

SEQ ID NO: 1861 - protein, 7 aa, Artificial sequence
  Synthetic peptide
AVESTVA

SEQ ID NO: 1862 - protein, 7 aa, Artificial sequence
  Synthetic peptide
VESTVAT

SEQ ID NO: 1863 - protein, 7 aa, Artificial sequence
  Synthetic peptide
ESTVATL

SEQ ID NO: 1864 - protein, 7 aa, Artificial sequence
  Synthetic peptide
STVATLE

SEQ ID NO: 1865 - protein, 7 aa, Artificial sequence
  Synthetic peptide
TVATLED

SEQ ID NO: 1866 - protein, 7 aa, Artificial sequence
  Synthetic peptide
VATLEDS

SEQ ID NO: 1867 - protein, 7 aa, Artificial sequence
  Synthetic peptide
ATLEDSP

SEQ ID NO: 1868 - protein, 7 aa, Artificial sequence
  Synthetic peptide
TLEDSPE

SEQ ID NO: 1869 - protein, 7 aa, Artificial sequence
  Synthetic peptide
LEDSPEV

SEQ ID NO: 1870 - protein, 7 aa, Artificial sequence
  Synthetic peptide
EDSPEVI

SEQ ID NO: 1871 - protein, 7 aa, Artificial sequence
  Synthetic peptide
DSPEVIE

SEQ ID NO: 1872 - protein, 7 aa, Artificial sequence
  Synthetic peptide
SPEVIES

SEQ ID NO: 1873 - protein, 7 aa, Artificial sequence
  Synthetic peptide
PEVIESP

SEQ ID NO: 1874 - protein, 7 aa, Artificial sequence
  Synthetic peptide
EVIESPP

SEQ ID NO: 1875 - protein, 7 aa, Artificial sequence
  Synthetic peptide
VIESPPE

SEQ ID NO: 1876 - protein, 7 aa, Artificial sequence
  Synthetic peptide
IESPPEI

SEQ ID NO: 1877 - protein, 7 aa, Artificial sequence
  Synthetic peptide
ESPPEIN

SEQ ID NO: 1878 - protein, 7 aa, Artificial sequence
  Synthetic peptide
SPPEINT

SEQ ID NO: 1879 - protein, 7 aa, Artificial sequence
  Synthetic peptide
PPEINTV

SEQ ID NO: 1880 - protein, 7 aa, Artificial sequence
  Synthetic peptide
PEINTVQ

SEQ ID NO: 1881 - protein, 7 aa, Artificial sequence
  Synthetic peptide
EINTVQV

SEQ ID NO: 1882 - protein, 7 aa, Artificial sequence
  Synthetic peptide
INTVQVT

SEQ ID NO: 1883 - protein, 7 aa, Artificial sequence
  Synthetic peptide
NTVQVTS

SEQ ID NO: 1884 - protein, 7 aa, Artificial sequence
  Synthetic peptide
TVQVTST

SEQ ID NO: 1885 - protein, 7 aa, Artificial sequence
  Synthetic peptide
VQVTSTA

SEQ ID NO: 1886 - protein, 7 aa, Artificial sequence
  Synthetic peptide
QVTSTAV

SEQ ID NO: 1887 - protein, 8 aa, Artificial sequence
  Synthetic peptide
MAIPPKKN

SEQ ID NO: 1888 - protein, 8 aa, Artificial sequence
  Synthetic peptide
AIPPKKNQ

SEQ ID NO: 1889 - protein, 8 aa, Artificial sequence
  Synthetic peptide
IPPKKNQD

SEQ ID NO: 1890 - protein, 8 aa, Artificial sequence
  Synthetic peptide
PPKKNQDK

SEQ ID NO: 1891 - protein, 8 aa, Artificial sequence
  Synthetic peptide
PKKNQDKT

SEQ ID NO: 1892 - protein, 8 aa, Artificial sequence
  Synthetic peptide
KKNQDKTE

SEQ ID NO: 1893 - protein, 8 aa, Artificial sequence
  Synthetic peptide
KNQDKTEI

SEQ ID NO: 1894 - protein, 8 aa, Artificial sequence
  Synthetic peptide
NQDKTEIP

SEQ ID NO: 1895 - protein, 8 aa, Artificial sequence
  Synthetic peptide
QDKTEIPT

SEQ ID NO: 1896 - protein, 8 aa, Artificial sequence
  Synthetic peptide
DKTEIPTI

SEQ ID NO: 1897 - protein, 8 aa, Artificial sequence
  Synthetic peptide
KTEIPTIN

SEQ ID NO: 1898 - protein, 8 aa, Artificial sequence
  Synthetic peptide
TEIPTINT

SEQ ID NO: 1899 - protein, 8 aa, Artificial sequence
  Synthetic peptide
EIPTINTI

SEQ ID NO: 1900 - protein, 8 aa, Artificial sequence
  Synthetic peptide
IPTINTIA

SEQ ID NO: 1901 - protein, 8 aa, Artificial sequence
  Synthetic peptide
PTINTIAS

SEQ ID NO: 1902 - protein, 8 aa, Artificial sequence
  Synthetic peptide
TINTIASG

SEQ ID NO: 1903 - protein, 8 aa, Artificial sequence
  Synthetic peptide
INTIASGE

SEQ ID NO: 1904 - protein, 8 aa, Artificial sequence
  Synthetic peptide
NTIASGEP

SEQ ID NO: 1905 - protein, 8 aa, Artificial sequence
  Synthetic peptide
TIASGEPT

SEQ ID NO: 1906 - protein, 8 aa, Artificial sequence
  Synthetic peptide
IASGEPTS

SEQ ID NO: 1907 - protein, 8 aa, Artificial sequence
  Synthetic peptide
ASGEPTST

SEQ ID NO: 1908 - protein, 8 aa, Artificial sequence
  Synthetic peptide
SGEPTSTP

SEQ ID NO: 1909 - protein, 8 aa, Artificial sequence
  Synthetic peptide
GEPTSTPT

SEQ ID NO: 1910 - protein, 8 aa, Artificial sequence
  Synthetic peptide
EPTSTPTT

SEQ ID NO: 1911 - protein, 8 aa, Artificial sequence
  Synthetic peptide
PTSTPTTE

SEQ ID NO: 1912 - protein, 8 aa, Artificial sequence
  Synthetic peptide
TSTPTTEA

SEQ ID NO: 1913 - protein, 8 aa, Artificial sequence
  Synthetic peptide
STPTTEAV

SEQ ID NO: 1914 - protein, 8 aa, Artificial sequence
  Synthetic peptide
TPTTEAVE

SEQ ID NO: 1915 - protein, 8 aa, Artificial sequence
  Synthetic peptide
PTTEAVES

SEQ ID NO: 1916 - protein, 8 aa, Artificial sequence
  Synthetic peptide
TTEAVEST

SEQ ID NO: 1917 - protein, 8 aa, Artificial sequence
  Synthetic peptide
TEAVESTV

SEQ ID NO: 1918 - protein, 8 aa, Artificial sequence
  Synthetic peptide
EAVESTVA

SEQ ID NO: 1919 - protein, 8 aa, Artificial sequence
  Synthetic peptide
AVESTVAT

SEQ ID NO: 1920 - protein, 8 aa, Artificial sequence
  Synthetic peptide
VESTVATL

SEQ ID NO: 1921 - protein, 8 aa, Artificial sequence
  Synthetic peptide
ESTVATLE

SEQ ID NO: 1922 - protein, 8 aa, Artificial sequence
  Synthetic peptide
STVATLED

SEQ ID NO: 1923 - protein, 8 aa, Artificial sequence
  Synthetic peptide
TVATLEDS

SEQ ID NO: 1924 - protein, 8 aa, Artificial sequence
  Synthetic peptide
VATLEDSP

SEQ ID NO: 1925 - protein, 8 aa, Artificial sequence
  Synthetic peptide
ATLEDSPE

SEQ ID NO: 1926 - protein, 8 aa, Artificial sequence
  Synthetic peptide
TLEDSPEV

SEQ ID NO: 1927 - protein, 8 aa, Artificial sequence
  Synthetic peptide
LEDSPEVI

SEQ ID NO: 1928 - protein, 8 aa, Artificial sequence
  Synthetic peptide
EDSPEVIE

SEQ ID NO: 1929 - protein, 8 aa, Artificial sequence
  Synthetic peptide
DSPEVIES

SEQ ID NO: 1930 - protein, 8 aa, Artificial sequence
  Synthetic peptide
SPEVIESP

SEQ ID NO: 1931 - protein, 8 aa, Artificial sequence
  Synthetic peptide
PEVIESPP

SEQ ID NO: 1932 - protein, 8 aa, Artificial sequence
  Synthetic peptide
EVIESPPE

SEQ ID NO: 1933 - protein, 8 aa, Artificial sequence
  Synthetic peptide
VIESPPEI

SEQ ID NO: 1934 - protein, 8 aa, Artificial sequence
  Synthetic peptide
IESPPEIN

SEQ ID NO: 1935 - protein, 8 aa, Artificial sequence
  Synthetic peptide
ESPPEINT

SEQ ID NO: 1936 - protein, 8 aa, Artificial sequence
  Synthetic peptide
SPPEINTV

SEQ ID NO: 1937 - protein, 8 aa, Artificial sequence
  Synthetic peptide
PPEINTVQ

SEQ ID NO: 1938 - protein, 8 aa, Artificial sequence
  Synthetic peptide
PEINTVQV

SEQ ID NO: 1939 - protein, 8 aa, Artificial sequence
  Synthetic peptide
EINTVQVT

SEQ ID NO: 1940 - protein, 8 aa, Artificial sequence
  Synthetic peptide
INTVQVTS

SEQ ID NO: 1941 - protein, 8 aa, Artificial sequence
  Synthetic peptide
NTVQVTST

SEQ ID NO: 1942 - protein, 8 aa, Artificial sequence
  Synthetic peptide
TVQVTSTA

SEQ ID NO: 1943 - protein, 8 aa, Artificial sequence
  Synthetic peptide
VQVTSTAV

SEQ ID NO: 1944 - protein, 9 aa, Artificial sequence
  Synthetic peptide
MAIPPKKNQ

SEQ ID NO: 1945 - protein, 9 aa, Artificial sequence
  Synthetic peptide
AIPPKKNQD

SEQ ID NO: 1946 - protein, 9 aa, Artificial sequence
  Synthetic peptide
IPPKKNQDK

SEQ ID NO: 1947 - protein, 9 aa, Artificial sequence
  Synthetic peptide
PPKKNQDKT

SEQ ID NO: 1948 - protein, 9 aa, Artificial sequence
  Synthetic peptide
PKKNQDKTE

SEQ ID NO: 1949 - protein, 9 aa, Artificial sequence
  Synthetic peptide
KKNQDKTEI

SEQ ID NO: 1950 - protein, 9 aa, Artificial sequence
  Synthetic peptide
KNQDKTEIP

SEQ ID NO: 1951 - protein, 9 aa, Artificial sequence
  Synthetic peptide
NQDKTEIPT

SEQ ID NO: 1952 - protein, 9 aa, Artificial sequence
  Synthetic peptide
QDKTEIPTI

SEQ ID NO: 1953 - protein, 9 aa, Artificial sequence
  Synthetic peptide
DKTEIPTIN

SEQ ID NO: 1954 - protein, 9 aa, Artificial sequence
  Synthetic peptide
KTEIPTINT

SEQ ID NO: 1955 - protein, 9 aa, Artificial sequence
  Synthetic peptide
TEIPTINTI

SEQ ID NO: 1956 - protein, 9 aa, Artificial sequence
  Synthetic peptide
EIPTINTIA

SEQ ID NO: 1957 - protein, 9 aa, Artificial sequence
  Synthetic peptide
IPTINTIAS

SEQ ID NO: 1958 - protein, 9 aa, Artificial sequence
  Synthetic peptide
PTINTIASG

SEQ ID NO: 1959 - protein, 9 aa, Artificial sequence
  Synthetic peptide
TINTIASGE

SEQ ID NO: 1960 - protein, 9 aa, Artificial sequence
  Synthetic peptide
INTIASGEP

SEQ ID NO: 1961 - protein, 9 aa, Artificial sequence
  Synthetic peptide
NTIASGEPT

SEQ ID NO: 1962 - protein, 9 aa, Artificial sequence
  Synthetic peptide
TIASGEPTS

SEQ ID NO: 1963 - protein, 9 aa, Artificial sequence
  Synthetic peptide
IASGEPTST

SEQ ID NO: 1964 - protein, 9 aa, Artificial sequence
  Synthetic peptide
ASGEPTSTP

SEQ ID NO: 1965 - protein, 9 aa, Artificial sequence
  Synthetic peptide
SGEPTSTPT

SEQ ID NO: 1966 - protein, 9 aa, Artificial sequence
  Synthetic peptide
GEPTSTPTT

SEQ ID NO: 1967 - protein, 9 aa, Artificial sequence
  Synthetic peptide
EPTSTPTTE

SEQ ID NO: 1968 - protein, 9 aa, Artificial sequence
  Synthetic peptide
PTSTPTTEA

SEQ ID NO: 1969 - protein, 9 aa, Artificial sequence
  Synthetic peptide
TSTPTTEAV

SEQ ID NO: 1970 - protein, 9 aa, Artificial sequence
  Synthetic peptide
STPTTEAVE

SEQ ID NO: 1971 - protein, 9 aa, Artificial sequence
  Synthetic peptide
TPTTEAVES

SEQ ID NO: 1972 - protein, 9 aa, Artificial sequence
  Synthetic peptide
PTTEAVEST

SEQ ID NO: 1973 - protein, 9 aa, Artificial sequence
  Synthetic peptide
TTEAVESTV

SEQ ID NO: 1974 - protein, 9 aa, Artificial sequence
  Synthetic peptide
TEAVESTVA

SEQ ID NO: 1975 - protein, 9 aa, Artificial sequence
  Synthetic peptide
EAVESTVAT

SEQ ID NO: 1976 - protein, 9 aa, Artificial sequence
  Synthetic peptide
AVESTVATL

SEQ ID NO: 1977 - protein, 9 aa, Artificial sequence
  Synthetic peptide
VESTVATLE

SEQ ID NO: 1978 - protein, 9 aa, Artificial sequence
  Synthetic peptide
ESTVATLED

SEQ ID NO: 1979 - protein, 9 aa, Artificial sequence
  Synthetic peptide
STVATLEDS

SEQ ID NO: 1980 - protein, 9 aa, Artificial sequence
  Synthetic peptide
TVATLEDSP

SEQ ID NO: 1981 - protein, 9 aa, Artificial sequence
  Synthetic peptide
VATLEDSPE

SEQ ID NO: 1982 - protein, 9 aa, Artificial sequence
  Synthetic peptide
ATLEDSPEV

SEQ ID NO: 1983 - protein, 9 aa, Artificial sequence
  Synthetic peptide
TLEDSPEVI

SEQ ID NO: 1984 - protein, 9 aa, Artificial sequence
  Synthetic peptide
LEDSPEVIE

SEQ ID NO: 1985 - protein, 9 aa, Artificial sequence
  Synthetic peptide
EDSPEVIES

SEQ ID NO: 1986 - protein, 9 aa, Artificial sequence
  Synthetic peptide
DSPEVIESP

SEQ ID NO: 1987 - protein, 9 aa, Artificial sequence
  Synthetic peptide
SPEVIESPP

SEQ ID NO: 1988 - protein, 9 aa, Artificial sequence
  Synthetic peptide
PEVIESPPE

SEQ ID NO: 1989 - protein, 9 aa, Artificial sequence
  Synthetic peptide
EVIESPPEI

SEQ ID NO: 1990 - protein, 9 aa, Artificial sequence
  Synthetic peptide
VIESPPEIN

SEQ ID NO: 1991 - protein, 9 aa, Artificial sequence
  Synthetic peptide
IESPPEINT

SEQ ID NO: 1992 - protein, 9 aa, Artificial sequence
  Synthetic peptide
ESPPEINTV

SEQ ID NO: 1993 - protein, 9 aa, Artificial sequence
  Synthetic peptide
SPPEINTVQ

SEQ ID NO: 1994 - protein, 9 aa, Artificial sequence
  Synthetic peptide
PPEINTVQV

SEQ ID NO: 1995 - protein, 9 aa, Artificial sequence
  Synthetic peptide
PEINTVQVT

SEQ ID NO: 1996 - protein, 9 aa, Artificial sequence
  Synthetic peptide
EINTVQVTS

SEQ ID NO: 1997 - protein, 9 aa, Artificial sequence
  Synthetic peptide
INTVQVTST

SEQ ID NO: 1998 - protein, 9 aa, Artificial sequence
  Synthetic peptide
NTVQVTSTA

SEQ ID NO: 1999 - protein, 9 aa, Artificial sequence
  Synthetic peptide
TVQVTSTAV

SEQ ID NO: 2000 - protein, 10 aa, Artificial sequence
  Synthetic peptide
MAIPPKKNQD

SEQ ID NO: 2001 - protein, 10 aa, Artificial sequence
  Synthetic peptide
AIPPKKNQDK

SEQ ID NO: 2002 - protein, 10 aa, Artificial sequence
  Synthetic peptide
IPPKKNQDKT

SEQ ID NO: 2003 - protein, 10 aa, Artificial sequence
  Synthetic peptide
PPKKNQDKTE

SEQ ID NO: 2004 - protein, 10 aa, Artificial sequence
  Synthetic peptide
PKKNQDKTEI

SEQ ID NO: 2005 - protein, 10 aa, Artificial sequence
  Synthetic peptide
KKNQDKTEIP

SEQ ID NO: 2006 - protein, 10 aa, Artificial sequence
  Synthetic peptide
KNQDKTEIPT

SEQ ID NO: 2007 - protein, 10 aa, Artificial sequence
  Synthetic peptide
NQDKTEIPTI

SEQ ID NO: 2008 - protein, 10 aa, Artificial sequence
  Synthetic peptide
QDKTEIPTIN

SEQ ID NO: 2009 - protein, 10 aa, Artificial sequence
  Synthetic peptide
DKTEIPTINT

SEQ ID NO: 2010 - protein, 10 aa, Artificial sequence
  Synthetic peptide
KTEIPTINTI

SEQ ID NO: 2011 - protein, 10 aa, Artificial sequence
  Synthetic peptide
TEIPTINTIA

SEQ ID NO: 2012 - protein, 10 aa, Artificial sequence
  Synthetic peptide
EIPTINTIAS

SEQ ID NO: 2013 - protein, 10 aa, Artificial sequence
  Synthetic peptide
IPTINTIASG

SEQ ID NO: 2014 - protein, 10 aa, Artificial sequence
  Synthetic peptide
PTINTIASGE

SEQ ID NO: 2015 - protein, 10 aa, Artificial sequence
  Synthetic peptide
TINTIASGEP

SEQ ID NO: 2016 - protein, 10 aa, Artificial sequence
  Synthetic peptide
INTIASGEPT

SEQ ID NO: 2017 - protein, 10 aa, Artificial sequence
  Synthetic peptide
NTIASGEPTS

SEQ ID NO: 2018 - protein, 10 aa, Artificial sequence
  Synthetic peptide
TIASGEPTST

SEQ ID NO: 2019 - protein, 10 aa, Artificial sequence
  Synthetic peptide
IASGEPTSTP

SEQ ID NO: 2020 - protein, 10 aa, Artificial sequence
  Synthetic peptide
ASGEPTSTPT

SEQ ID NO: 2021 - protein, 10 aa, Artificial sequence
  Synthetic peptide
SGEPTSTPTT

SEQ ID NO: 2022 - protein, 10 aa, Artificial sequence
  Synthetic peptide
GEPTSTPTTE

SEQ ID NO: 2023 - protein, 10 aa, Artificial sequence
  Synthetic peptide
EPTSTPTTEA

SEQ ID NO: 2024 - protein, 10 aa, Artificial sequence
  Synthetic peptide
PTSTPTTEAV

SEQ ID NO: 2025 - protein, 10 aa, Artificial sequence
  Synthetic peptide
TSTPTTEAVE

SEQ ID NO: 2026 - protein, 10 aa, Artificial sequence
  Synthetic peptide
STPTTEAVES

SEQ ID NO: 2027 - protein, 10 aa, Artificial sequence
  Synthetic peptide
TPTTEAVEST

SEQ ID NO: 2028 - protein, 10 aa, Artificial sequence
  Synthetic peptide
PTTEAVESTV

SEQ ID NO: 2029 - protein, 10 aa, Artificial sequence
  Synthetic peptide
TTEAVESTVA

SEQ ID NO: 2030 - protein, 10 aa, Artificial sequence
  Synthetic peptide
TEAVESTVAT

SEQ ID NO: 2031 - protein, 10 aa, Artificial sequence
  Synthetic peptide
EAVESTVATL

SEQ ID NO: 2032 - protein, 10 aa, Artificial sequence
  Synthetic peptide
AVESTVATLE

SEQ ID NO: 2033 - protein, 10 aa, Artificial sequence
  Synthetic peptide
VESTVATLED

SEQ ID NO: 2034 - protein, 10 aa, Artificial sequence
  Synthetic peptide
ESTVATLEDS

SEQ ID NO: 2035 - protein, 10 aa, Artificial sequence
  Synthetic peptide
STVATLEDSP

SEQ ID NO: 2036 - protein, 10 aa, Artificial sequence
  Synthetic peptide
TVATLEDSPE

SEQ ID NO: 2037 - protein, 10 aa, Artificial sequence
  Synthetic peptide
VATLEDSPEV

SEQ ID NO: 2038 - protein, 10 aa, Artificial sequence
  Synthetic peptide
ATLEDSPEVI

SEQ ID NO: 2039 - protein, 10 aa, Artificial sequence
  Synthetic peptide
TLEDSPEVIE

SEQ ID NO: 2040 - protein, 10 aa, Artificial sequence
  Synthetic peptide
LEDSPEVIES

SEQ ID NO: 2041 - protein, 10 aa, Artificial sequence
  Synthetic peptide
EDSPEVIESP

SEQ ID NO: 2042 - protein, 10 aa, Artificial sequence
  Synthetic peptide
DSPEVIESPP

SEQ ID NO: 2043 - protein, 10 aa, Artificial sequence
  Synthetic peptide
SPEVIESPPE

SEQ ID NO: 2044 - protein, 10 aa, Artificial sequence
  Synthetic peptide
PEVIESPPEI

SEQ ID NO: 2045 - protein, 10 aa, Artificial sequence
  Synthetic peptide
EVIESPPEIN

SEQ ID NO: 2046 - protein, 10 aa, Artificial sequence
  Synthetic peptide
VIESPPEINT

SEQ ID NO: 2047 - protein, 10 aa, Artificial sequence
  Synthetic peptide
IESPPEINTV

SEQ ID NO: 2048 - protein, 10 aa, Artificial sequence
  Synthetic peptide
ESPPEINTVQ

SEQ ID NO: 2049 - protein, 10 aa, Artificial sequence
  Synthetic peptide
SPPEINTVQV

SEQ ID NO: 2050 - protein, 10 aa, Artificial sequence
  Synthetic peptide
PPEINTVQVT

SEQ ID NO: 2051 - protein, 10 aa, Artificial sequence
  Synthetic peptide
PEINTVQVTS

SEQ ID NO: 2052 - protein, 10 aa, Artificial sequence
  Synthetic peptide
EINTVQVTST

SEQ ID NO: 2053 - protein, 10 aa, Artificial sequence
  Synthetic peptide
INTVQVTSTA

SEQ ID NO: 2054 - protein, 10 aa, Artificial sequence
  Synthetic peptide
NTVQVTSTAV

SEQ ID NO: 2055 - protein, 11 aa, Artificial sequence
  Synthetic peptide
MAIPPKKNQDK

SEQ ID NO: 2056 - protein, 11 aa, Artificial sequence
  Synthetic peptide
AIPPKKNQDKT

SEQ ID NO: 2057 - protein, 11 aa, Artificial sequence
  Synthetic peptide
IPPKKNQDKTE

SEQ ID NO: 2058 - protein, 11 aa, Artificial sequence
  Synthetic peptide
PPKKNQDKTEI

SEQ ID NO: 2059 - protein, 11 aa, Artificial sequence
  Synthetic peptide
PKKNQDKTEIP

SEQ ID NO: 2060 - protein, 11 aa, Artificial sequence
  Synthetic peptide
KKNQDKTEIPT

SEQ ID NO: 2061 - protein, 11 aa, Artificial sequence
  Synthetic peptide
KNQDKTEIPTI

SEQ ID NO: 2062 - protein, 11 aa, Artificial sequence
  Synthetic peptide
NQDKTEIPTIN

SEQ ID NO: 2063 - protein, 11 aa, Artificial sequence
  Synthetic peptide
QDKTEIPTINT

SEQ ID NO: 2064 - protein, 11 aa, Artificial sequence
  Synthetic peptide
DKTEIPTINTI

SEQ ID NO: 2065 - protein, 11 aa, Artificial sequence
  Synthetic peptide
KTEIPTINTIA

SEQ ID NO: 2066 - protein, 11 aa, Artificial sequence
  Synthetic peptide
TEIPTINTIAS

SEQ ID NO: 2067 - protein, 11 aa, Artificial sequence
  Synthetic peptide
EIPTINTIASG

SEQ ID NO: 2068 - protein, 11 aa, Artificial sequence
  Synthetic peptide
IPTINTIASGE

SEQ ID NO: 2069 - protein, 11 aa, Artificial sequence
  Synthetic peptide
PTINTIASGEP

SEQ ID NO: 2070 - protein, 11 aa, Artificial sequence
  Synthetic peptide
TINTIASGEPT

SEQ ID NO: 2071 - protein, 11 aa, Artificial sequence
  Synthetic peptide
INTIASGEPTS

SEQ ID NO: 2072 - protein, 11 aa, Artificial sequence
  Synthetic peptide
NTIASGEPTST

SEQ ID NO: 2073 - protein, 11 aa, Artificial sequence
  Synthetic peptide
TIASGEPTSTP

SEQ ID NO: 2074 - protein, 11 aa, Artificial sequence
  Synthetic peptide
IASGEPTSTPT

SEQ ID NO: 2075 - protein, 11 aa, Artificial sequence
  Synthetic peptide
ASGEPTSTPTT

SEQ ID NO: 2076 - protein, 11 aa, Artificial sequence
  Synthetic peptide
SGEPTSTPTTE

SEQ ID NO: 2077 - protein, 11 aa, Artificial sequence
  Synthetic peptide
GEPTSTPTTEA

SEQ ID NO: 2078 - protein, 11 aa, Artificial sequence
  Synthetic peptide
EPTSTPTTEAV

SEQ ID NO: 2079 - protein, 11 aa, Artificial sequence
  Synthetic peptide
PTSTPTTEAVE

SEQ ID NO: 2080 - protein, 11 aa, Artificial sequence
  Synthetic peptide
TSTPTTEAVES

SEQ ID NO: 2081 - protein, 11 aa, Artificial sequence
  Synthetic peptide
STPTTEAVEST

SEQ ID NO: 2082 - protein, 11 aa, Artificial sequence
  Synthetic peptide
TPTTEAVESTV

SEQ ID NO: 2083 - protein, 11 aa, Artificial sequence
  Synthetic peptide
PTTEAVESTVA

SEQ ID NO: 2084 - protein, 11 aa, Artificial sequence
  Synthetic peptide
TTEAVESTVAT

SEQ ID NO: 2085 - protein, 11 aa, Artificial sequence
  Synthetic peptide
TEAVESTVATL

SEQ ID NO: 2086 - protein, 11 aa, Artificial sequence
  Synthetic peptide
EAVESTVATLE

SEQ ID NO: 2087 - protein, 11 aa, Artificial sequence
  Synthetic peptide
AVESTVATLED

SEQ ID NO: 2088 - protein, 11 aa, Artificial sequence
  Synthetic peptide
VESTVATLEDS

SEQ ID NO: 2089 - protein, 11 aa, Artificial sequence
  Synthetic peptide
ESTVATLEDSP

SEQ ID NO: 2090 - protein, 11 aa, Artificial sequence
  Synthetic peptide
STVATLEDSPE

SEQ ID NO: 2091 - protein, 11 aa, Artificial sequence
  Synthetic peptide
TVATLEDSPEV

SEQ ID NO: 2092 - protein, 11 aa, Artificial sequence
  Synthetic peptide
VATLEDSPEVI

SEQ ID NO: 2093 - protein, 11 aa, Artificial sequence
  Synthetic peptide
ATLEDSPEVIE

SEQ ID NO: 2094 - protein, 11 aa, Artificial sequence
  Synthetic peptide
TLEDSPEVIES

SEQ ID NO: 2095 - protein, 11 aa, Artificial sequence
  Synthetic peptide
LEDSPEVIESP

SEQ ID NO: 2096 - protein, 11 aa, Artificial sequence
  Synthetic peptide
EDSPEVIESPP

SEQ ID NO: 2097 - protein, 11 aa, Artificial sequence
  Synthetic peptide
DSPEVIESPPE

SEQ ID NO: 2098 - protein, 11 aa, Artificial sequence
  Synthetic peptide
SPEVIESPPEI

SEQ ID NO: 2099 - protein, 11 aa, Artificial sequence
  Synthetic peptide
PEVIESPPEIN

SEQ ID NO: 2100 - protein, 11 aa, Artificial sequence
  Synthetic peptide
EVIESPPEINT

SEQ ID NO: 2101 - protein, 11 aa, Artificial sequence
  Synthetic peptide
VIESPPEINTV

SEQ ID NO: 2102 - protein, 11 aa, Artificial sequence
  Synthetic peptide
IESPPEINTVQ

SEQ ID NO: 2103 - protein, 11 aa, Artificial sequence
  Synthetic peptide
ESPPEINTVQV

SEQ ID NO: 2104 - protein, 11 aa, Artificial sequence
  Synthetic peptide
SPPEINTVQVT

SEQ ID NO: 2105 - protein, 11 aa, Artificial sequence
  Synthetic peptide
PPEINTVQVTS

SEQ ID NO: 2106 - protein, 11 aa, Artificial sequence
  Synthetic peptide
PEINTVQVTST

SEQ ID NO: 2107 - protein, 11 aa, Artificial sequence
  Synthetic peptide
EINTVQVTSTA

SEQ ID NO: 2108 - protein, 11 aa, Artificial sequence
  Synthetic peptide
INTVQVTSTAV

SEQ ID NO: 2109 - protein, 12 aa, Artificial sequence
  Synthetic peptide
MAIPPKKNQDKT

SEQ ID NO: 2110 - protein, 12 aa, Artificial sequence
  Synthetic peptide
AIPPKKNQDKTE

SEQ ID NO: 2111 - protein, 12 aa, Artificial sequence
  Synthetic peptide
IPPKKNQDKTEI

SEQ ID NO: 2112 - protein, 12 aa, Artificial sequence
  Synthetic peptide
PPKKNQDKTEIP

SEQ ID NO: 2113 - protein, 12 aa, Artificial sequence
  Synthetic peptide
PKKNQDKTEIPT

SEQ ID NO: 2114 - protein, 12 aa, Artificial sequence
  Synthetic peptide
KKNQDKTEIPTI

SEQ ID NO: 2115 - protein, 12 aa, Artificial sequence
  Synthetic peptide
KNQDKTEIPTIN

SEQ ID NO: 2116 - protein, 12 aa, Artificial sequence
  Synthetic peptide
NQDKTEIPTINT

SEQ ID NO: 2117 - protein, 12 aa, Artificial sequence
  Synthetic peptide
QDKTEIPTINTI

SEQ ID NO: 2118 - protein, 12 aa, Artificial sequence
  Synthetic peptide
DKTEIPTINTIA

SEQ ID NO: 2119 - protein, 12 aa, Artificial sequence
  Synthetic peptide
KTEIPTINTIAS

SEQ ID NO: 2120 - protein, 12 aa, Artificial sequence
  Synthetic peptide
TEIPTINTIASG

SEQ ID NO: 2121 - protein, 12 aa, Artificial sequence
  Synthetic peptide
EIPTINTIASGE

SEQ ID NO: 2122 - protein, 12 aa, Artificial sequence
  Synthetic peptide
IPTINTIASGEP

SEQ ID NO: 2123 - protein, 12 aa, Artificial sequence
  Synthetic peptide
PTINTIASGEPT

SEQ ID NO: 2124 - protein, 12 aa, Artificial sequence
  Synthetic peptide
TINTIASGEPTS

SEQ ID NO: 2125 - protein, 12 aa, Artificial sequence
  Synthetic peptide
INTIASGEPTST

SEQ ID NO: 2126 - protein, 12 aa, Artificial sequence
  Synthetic peptide
NTIASGEPTSTP

SEQ ID NO: 2127 - protein, 12 aa, Artificial sequence
  Synthetic peptide
TIASGEPTSTPT

SEQ ID NO: 2128 - protein, 12 aa, Artificial sequence
  Synthetic peptide
IASGEPTSTPTT

SEQ ID NO: 2129 - protein, 12 aa, Artificial sequence
  Synthetic peptide
ASGEPTSTPTTE

SEQ ID NO: 2130 - protein, 12 aa, Artificial sequence
  Synthetic peptide
SGEPTSTPTTEA

SEQ ID NO: 2131 - protein, 12 aa, Artificial sequence
  Synthetic peptide
GEPTSTPTTEAV

SEQ ID NO: 2132 - protein, 12 aa, Artificial sequence
  Synthetic peptide
EPTSTPTTEAVE

SEQ ID NO: 2133 - protein, 12 aa, Artificial sequence
  Synthetic peptide
PTSTPTTEAVES

SEQ ID NO: 2134 - protein, 12 aa, Artificial sequence
  Synthetic peptide
TSTPTTEAVEST

SEQ ID NO: 2135 - protein, 12 aa, Artificial sequence
  Synthetic peptide
STPTTEAVESTV

SEQ ID NO: 2136 - protein, 12 aa, Artificial sequence
  Synthetic peptide
TPTTEAVESTVA

SEQ ID NO: 2137 - protein, 12 aa, Artificial sequence
  Synthetic peptide
PTTEAVESTVAT

SEQ ID NO: 2138 - protein, 12 aa, Artificial sequence
  Synthetic peptide
TTEAVESTVATL

SEQ ID NO: 2139 - protein, 12 aa, Artificial sequence
  Synthetic peptide
TEAVESTVATLE

SEQ ID NO: 2140 - protein, 12 aa, Artificial sequence
  Synthetic peptide
EAVESTVATLED

SEQ ID NO: 2141 - protein, 12 aa, Artificial sequence
  Synthetic peptide
AVESTVATLEDS

SEQ ID NO: 2142 - protein, 12 aa, Artificial sequence
  Synthetic peptide
VESTVATLEDSP

SEQ ID NO: 2143 - protein, 12 aa, Artificial sequence
  Synthetic peptide
ESTVATLEDSPE

SEQ ID NO: 2144 - protein, 12 aa, Artificial sequence
  Synthetic peptide
STVATLEDSPEV

SEQ ID NO: 2145 - protein, 12 aa, Artificial sequence
  Synthetic peptide
TVATLEDSPEVI

SEQ ID NO: 2146 - protein, 12 aa, Artificial sequence
  Synthetic peptide
VATLEDSPEVIE

SEQ ID NO: 2147 - protein, 12 aa, Artificial sequence
  Synthetic peptide
ATLEDSPEVIES

SEQ ID NO: 2148 - protein, 12 aa, Artificial sequence
  Synthetic peptide
TLEDSPEVIESP

SEQ ID NO: 2149 - protein, 12 aa, Artificial sequence
  Synthetic peptide
LEDSPEVIESPP

SEQ ID NO: 2150 - protein, 12 aa, Artificial sequence
  Synthetic peptide
EDSPEVIESPPE

SEQ ID NO: 2151 - protein, 12 aa, Artificial sequence
  Synthetic peptide
DSPEVIESPPEI

SEQ ID NO: 2152 - protein, 12 aa, Artificial sequence
  Synthetic peptide
SPEVIESPPEIN

SEQ ID NO: 2153 - protein, 12 aa, Artificial sequence
  Synthetic peptide
PEVIESPPEINT

SEQ ID NO: 2154 - protein, 12 aa, Artificial sequence
  Synthetic peptide
EVIESPPEINTV

SEQ ID NO: 2155 - protein, 12 aa, Artificial sequence
  Synthetic peptide
VIESPPEINTVQ

SEQ ID NO: 2156 - protein, 12 aa, Artificial sequence
  Synthetic peptide
IESPPEINTVQV

SEQ ID NO: 2157 - protein, 12 aa, Artificial sequence
  Synthetic peptide
ESPPEINTVQVT

SEQ ID NO: 2158 - protein, 12 aa, Artificial sequence
  Synthetic peptide
SPPEINTVQVTS

SEQ ID NO: 2159 - protein, 12 aa, Artificial sequence
  Synthetic peptide
PPEINTVQVTST

SEQ ID NO: 2160 - protein, 12 aa, Artificial sequence
  Synthetic peptide
PEINTVQVTSTA

SEQ ID NO: 2161 - protein, 12 aa, Artificial sequence
  Synthetic peptide
EINTVQVTSTAV

SEQ ID NO: 2162 - protein, 13 aa, Artificial sequence
  Synthetic peptide
MAIPPKKNQDKTE

SEQ ID NO: 2163 - protein, 13 aa, Artificial sequence
  Synthetic peptide
AIPPKKNQDKTEI

SEQ ID NO: 2164 - protein, 13 aa, Artificial sequence
  Synthetic peptide
IPPKKNQDKTEIP

SEQ ID NO: 2165 - protein, 13 aa, Artificial sequence
  Synthetic peptide
PPKKNQDKTEIPT

SEQ ID NO: 2166 - protein, 13 aa, Artificial sequence
  Synthetic peptide
PKKNQDKTEIPTI

SEQ ID NO: 2167 - protein, 13 aa, Artificial sequence
  Synthetic peptide
KKNQDKTEIPTIN

SEQ ID NO: 2168 - protein, 13 aa, Artificial sequence
  Synthetic peptide
KNQDKTEIPTINT

SEQ ID NO: 2169 - protein, 13 aa, Artificial sequence
  Synthetic peptide
NQDKTEIPTINTI

SEQ ID NO: 2170 - protein, 13 aa, Artificial sequence
  Synthetic peptide
QDKTEIPTINTIA

SEQ ID NO: 2171 - protein, 13 aa, Artificial sequence
  Synthetic peptide
DKTEIPTINTIAS

SEQ ID NO: 2172 - protein, 13 aa, Artificial sequence
  Synthetic peptide
KTEIPTINTIASG

SEQ ID NO: 2173 - protein, 13 aa, Artificial sequence
  Synthetic peptide
TEIPTINTIASGE

SEQ ID NO: 2174 - protein, 13 aa, Artificial sequence
  Synthetic peptide
EIPTINTIASGEP

SEQ ID NO: 2175 - protein, 13 aa, Artificial sequence
  Synthetic peptide
IPTINTIASGEPT

SEQ ID NO: 2176 - protein, 13 aa, Artificial sequence
  Synthetic peptide
PTINTIASGEPTS

SEQ ID NO: 2177 - protein, 13 aa, Artificial sequence
  Synthetic peptide
TINTIASGEPTST

SEQ ID NO: 2178 - protein, 13 aa, Artificial sequence
  Synthetic peptide
INTIASGEPTSTP

SEQ ID NO: 2179 - protein, 13 aa, Artificial sequence
  Synthetic peptide
NTIASGEPTSTPT

SEQ ID NO: 2180 - protein, 13 aa, Artificial sequence
  Synthetic peptide
TIASGEPTSTPTT

SEQ ID NO: 2181 - protein, 13 aa, Artificial sequence
  Synthetic peptide
IASGEPTSTPTTE

SEQ ID NO: 2182 - protein, 13 aa, Artificial sequence
  Synthetic peptide
ASGEPTSTPTTEA

SEQ ID NO: 2183 - protein, 13 aa, Artificial sequence
  Synthetic peptide
SGEPTSTPTTEAV

SEQ ID NO: 2184 - protein, 13 aa, Artificial sequence
  Synthetic peptide
GEPTSTPTTEAVE

SEQ ID NO: 2185 - protein, 13 aa, Artificial sequence
  Synthetic peptide
EPTSTPTTEAVES

SEQ ID NO: 2186 - protein, 13 aa, Artificial sequence
  Synthetic peptide
PTSTPTTEAVEST

SEQ ID NO: 2187 - protein, 13 aa, Artificial sequence
  Synthetic peptide
TSTPTTEAVESTV

SEQ ID NO: 2188 - protein, 13 aa, Artificial sequence
  Synthetic peptide
STPTTEAVESTVA

SEQ ID NO: 2189 - protein, 13 aa, Artificial sequence
  Synthetic peptide
TPTTEAVESTVAT

SEQ ID NO: 2190 - protein, 13 aa, Artificial sequence
  Synthetic peptide
PTTEAVESTVATL

SEQ ID NO: 2191 - protein, 13 aa, Artificial sequence
  Synthetic peptide
TTEAVESTVATLE

SEQ ID NO: 2192 - protein, 13 aa, Artificial sequence
  Synthetic peptide
TEAVESTVATLED

SEQ ID NO: 2193 - protein, 13 aa, Artificial sequence
  Synthetic peptide
EAVESTVATLEDS

SEQ ID NO: 2194 - protein, 13 aa, Artificial sequence
  Synthetic peptide
AVESTVATLEDSP

SEQ ID NO: 2195 - protein, 13 aa, Artificial sequence
  Synthetic peptide
VESTVATLEDSPE

SEQ ID NO: 2196 - protein, 13 aa, Artificial sequence
  Synthetic peptide
ESTVATLEDSPEV

SEQ ID NO: 2197 - protein, 13 aa, Artificial sequence
  Synthetic peptide
STVATLEDSPEVI

SEQ ID NO: 2198 - protein, 13 aa, Artificial sequence
  Synthetic peptide
TVATLEDSPEVIE

SEQ ID NO: 2199 - protein, 13 aa, Artificial sequence
  Synthetic peptide
VATLEDSPEVIES

SEQ ID NO: 2200 - protein, 13 aa, Artificial sequence
  Synthetic peptide
ATLEDSPEVIESP

SEQ ID NO: 2201 - protein, 13 aa, Artificial sequence
  Synthetic peptide
TLEDSPEVIESPP

SEQ ID NO: 2202 - protein, 13 aa, Artificial sequence
  Synthetic peptide
LEDSPEVIESPPE

SEQ ID NO: 2203 - protein, 13 aa, Artificial sequence
  Synthetic peptide
EDSPEVIESPPEI

SEQ ID NO: 2204 - protein, 13 aa, Artificial sequence
  Synthetic peptide
DSPEVIESPPEIN

SEQ ID NO: 2205 - protein, 13 aa, Artificial sequence
  Synthetic peptide
SPEVIESPPEINT

SEQ ID NO: 2206 - protein, 13 aa, Artificial sequence
  Synthetic peptide
PEVIESPPEINTV

SEQ ID NO: 2207 - protein, 13 aa, Artificial sequence
  Synthetic peptide
EVIESPPEINTVQ

SEQ ID NO: 2208 - protein, 13 aa, Artificial sequence
  Synthetic peptide
VIESPPEINTVQV

SEQ ID NO: 2209 - protein, 13 aa, Artificial sequence
  Synthetic peptide
IESPPEINTVQVT

SEQ ID NO: 2210 - protein, 13 aa, Artificial sequence
  Synthetic peptide
ESPPEINTVQVTS

SEQ ID NO: 2211 - protein, 13 aa, Artificial sequence
  Synthetic peptide
SPPEINTVQVTST

SEQ ID NO: 2212 - protein, 13 aa, Artificial sequence
  Synthetic peptide
PPEINTVQVTSTA

SEQ ID NO: 2213 - protein, 13 aa, Artificial sequence
  Synthetic peptide
PEINTVQVTSTAV

SEQ ID NO: 2214 - protein, 14 aa, Artificial sequence
  Synthetic peptide
MAIPPKKNQDKTEI

SEQ ID NO: 2215 - protein, 14 aa, Artificial sequence
  Synthetic peptide
AIPPKKNQDKTEIP

SEQ ID NO: 2216 - protein, 14 aa, Artificial sequence
  Synthetic peptide
IPPKKNQDKTEIPT

SEQ ID NO: 2217 - protein, 14 aa, Artificial sequence
  Synthetic peptide
PPKKNQDKTEIPTI

SEQ ID NO: 2218 - protein, 14 aa, Artificial sequence
  Synthetic peptide
PKKNQDKTEIPTIN

SEQ ID NO: 2219 - protein, 14 aa, Artificial sequence
  Synthetic peptide
KKNQDKTEIPTINT

SEQ ID NO: 2220 - protein, 14 aa, Artificial sequence
  Synthetic peptide
KNQDKTEIPTINTI

SEQ ID NO: 2221 - protein, 14 aa, Artificial sequence
  Synthetic peptide
NQDKTEIPTINTIA

SEQ ID NO: 2222 - protein, 14 aa, Artificial sequence
  Synthetic peptide
QDKTEIPTINTIAS

SEQ ID NO: 2223 - protein, 14 aa, Artificial sequence
  Synthetic peptide
DKTEIPTINTIASG

SEQ ID NO: 2224 - protein, 14 aa, Artificial sequence
  Synthetic peptide
KTEIPTINTIASGE

SEQ ID NO: 2225 - protein, 14 aa, Artificial sequence
  Synthetic peptide
TEIPTINTIASGEP

SEQ ID NO: 2226 - protein, 14 aa, Artificial sequence
  Synthetic peptide
EIPTINTIASGEPT

SEQ ID NO: 2227 - protein, 14 aa, Artificial sequence
  Synthetic peptide
IPTINTIASGEPTS

SEQ ID NO: 2228 - protein, 14 aa, Artificial sequence
  Synthetic peptide
PTINTIASGEPTST

SEQ ID NO: 2229 - protein, 14 aa, Artificial sequence
  Synthetic peptide
TINTIASGEPTSTP

SEQ ID NO: 2230 - protein, 14 aa, Artificial sequence
  Synthetic peptide
INTIASGEPTSTPT

SEQ ID NO: 2231 - protein, 14 aa, Artificial sequence
  Synthetic peptide
NTIASGEPTSTPTT

SEQ ID NO: 2232 - protein, 14 aa, Artificial sequence
  Synthetic peptide
TIASGEPTSTPTTE

SEQ ID NO: 2233 - protein, 14 aa, Artificial sequence
  Synthetic peptide
IASGEPTSTPTTEA

SEQ ID NO: 2234 - protein, 14 aa, Artificial sequence
  Synthetic peptide
ASGEPTSTPTTEAV

SEQ ID NO: 2235 - protein, 14 aa, Artificial sequence
  Synthetic peptide
SGEPTSTPTTEAVE

SEQ ID NO: 2236 - protein, 14 aa, Artificial sequence
  Synthetic peptide
GEPTSTPTTEAVES

SEQ ID NO: 2237 - protein, 14 aa, Artificial sequence
  Synthetic peptide
EPTSTPTTEAVEST

SEQ ID NO: 2238 - protein, 14 aa, Artificial sequence
  Synthetic peptide
PTSTPTTEAVESTV

SEQ ID NO: 2239 - protein, 14 aa, Artificial sequence
  Synthetic peptide
TSTPTTEAVESTVA

SEQ ID NO: 2240 - protein, 14 aa, Artificial sequence
  Synthetic peptide
STPTTEAVESTVAT

SEQ ID NO: 2241 - protein, 14 aa, Artificial sequence
  Synthetic peptide
TPTTEAVESTVATL

SEQ ID NO: 2242 - protein, 14 aa, Artificial sequence
  Synthetic peptide
PTTEAVESTVATLE

SEQ ID NO: 2243 - protein, 14 aa, Artificial sequence
  Synthetic peptide
TTEAVESTVATLED

SEQ ID NO: 2244 - protein, 14 aa, Artificial sequence
  Synthetic peptide
TEAVESTVATLEDS

SEQ ID NO: 2245 - protein, 14 aa, Artificial sequence
  Synthetic peptide
EAVESTVATLEDSP

SEQ ID NO: 2246 - protein, 14 aa, Artificial sequence
  Synthetic peptide
AVESTVATLEDSPE

SEQ ID NO: 2247 - protein, 14 aa, Artificial sequence
  Synthetic peptide
VESTVATLEDSPEV

SEQ ID NO: 2248 - protein, 14 aa, Artificial sequence
  Synthetic peptide
ESTVATLEDSPEVI

SEQ ID NO: 2249 - protein, 14 aa, Artificial sequence
  Synthetic peptide
STVATLEDSPEVIE

SEQ ID NO: 2250 - protein, 14 aa, Artificial sequence
  Synthetic peptide
TVATLEDSPEVIES

SEQ ID NO: 2251 - protein, 14 aa, Artificial sequence
  Synthetic peptide
VATLEDSPEVIESP

SEQ ID NO: 2252 - protein, 14 aa, Artificial sequence
  Synthetic peptide
ATLEDSPEVIESPP

SEQ ID NO: 2253 - protein, 14 aa, Artificial sequence
  Synthetic peptide
TLEDSPEVIESPPE

SEQ ID NO: 2254 - protein, 14 aa, Artificial sequence
  Synthetic peptide
LEDSPEVIESPPEI

SEQ ID NO: 2255 - protein, 14 aa, Artificial sequence
  Synthetic peptide
EDSPEVIESPPEIN

SEQ ID NO: 2256 - protein, 14 aa, Artificial sequence
  Synthetic peptide
DSPEVIESPPEINT

SEQ ID NO: 2257 - protein, 14 aa, Artificial sequence
  Synthetic peptide
SPEVIESPPEINTV

SEQ ID NO: 2258 - protein, 14 aa, Artificial sequence
  Synthetic peptide
PEVIESPPEINTVQ

SEQ ID NO: 2259 - protein, 14 aa, Artificial sequence
  Synthetic peptide
EVIESPPEINTVQV

SEQ ID NO: 2260 - protein, 14 aa, Artificial sequence
  Synthetic peptide
VIESPPEINTVQVT

SEQ ID NO: 2261 - protein, 14 aa, Artificial sequence
  Synthetic peptide
IESPPEINTVQVTS

SEQ ID NO: 2262 - protein, 14 aa, Artificial sequence
  Synthetic peptide
ESPPEINTVQVTST

SEQ ID NO: 2263 - protein, 14 aa, Artificial sequence
  Synthetic peptide
SPPEINTVQVTSTA

SEQ ID NO: 2264 - protein, 14 aa, Artificial sequence
  Synthetic peptide
PPEINTVQVTSTAV

SEQ ID NO: 2265 - protein, 15 aa, Artificial sequence
  Synthetic peptide
MAIPPKKNQDKTEIP

SEQ ID NO: 2266 - protein, 15 aa, Artificial sequence
  Synthetic peptide
AIPPKKNQDKTEIPT

SEQ ID NO: 2267 - protein, 15 aa, Artificial sequence
  Synthetic peptide
IPPKKNQDKTEIPTI

SEQ ID NO: 2268 - protein, 15 aa, Artificial sequence
  Synthetic peptide
PPKKNQDKTEIPTIN

SEQ ID NO: 2269 - protein, 15 aa, Artificial sequence
  Synthetic peptide
PKKNQDKTEIPTINT

SEQ ID NO: 2270 - protein, 15 aa, Artificial sequence
  Synthetic peptide
KKNQDKTEIPTINTI

SEQ ID NO: 2271 - protein, 15 aa, Artificial sequence
  Synthetic peptide
KNQDKTEIPTINTIA

SEQ ID NO: 2272 - protein, 15 aa, Artificial sequence
  Synthetic peptide
NQDKTEIPTINTIAS

SEQ ID NO: 2273 - protein, 15 aa, Artificial sequence
  Synthetic peptide
QDKTEIPTINTIASG

SEQ ID NO: 2274 - protein, 15 aa, Artificial sequence
  Synthetic peptide
DKTEIPTINTIASGE

SEQ ID NO: 2275 - protein, 15 aa, Artificial sequence
  Synthetic peptide
KTEIPTINTIASGEP

SEQ ID NO: 2276 - protein, 15 aa, Artificial sequence
  Synthetic peptide
TEIPTINTIASGEPT

SEQ ID NO: 2277 - protein, 15 aa, Artificial sequence
  Synthetic peptide
EIPTINTIASGEPTS

SEQ ID NO: 2278 - protein, 15 aa, Artificial sequence
  Synthetic peptide
IPTINTIASGEPTST

SEQ ID NO: 2279 - protein, 15 aa, Artificial sequence
  Synthetic peptide
PTINTIASGEPTSTP

SEQ ID NO: 2280 - protein, 15 aa, Artificial sequence
  Synthetic peptide
TINTIASGEPTSTPT

SEQ ID NO: 2281 - protein, 15 aa, Artificial sequence
  Synthetic peptide
INTIASGEPTSTPTT

SEQ ID NO: 2282 - protein, 15 aa, Artificial sequence
  Synthetic peptide
NTIASGEPTSTPTTE

SEQ ID NO: 2283 - protein, 15 aa, Artificial sequence
  Synthetic peptide
TIASGEPTSTPTTEA

SEQ ID NO: 2284 - protein, 15 aa, Artificial sequence
  Synthetic peptide
IASGEPTSTPTTEAV

SEQ ID NO: 2285 - protein, 15 aa, Artificial sequence
  Synthetic peptide
ASGEPTSTPTTEAVE

SEQ ID NO: 2286 - protein, 15 aa, Artificial sequence
  Synthetic peptide
SGEPTSTPTTEAVES

SEQ ID NO: 2287 - protein, 15 aa, Artificial sequence
  Synthetic peptide
GEPTSTPTTEAVEST

SEQ ID NO: 2288 - protein, 15 aa, Artificial sequence
  Synthetic peptide
EPTSTPTTEAVESTV

SEQ ID NO: 2289 - protein, 15 aa, Artificial sequence
  Synthetic peptide
PTSTPTTEAVESTVA

SEQ ID NO: 2290 - protein, 15 aa, Artificial sequence
  Synthetic peptide
TSTPTTEAVESTVAT

SEQ ID NO: 2291 - protein, 15 aa, Artificial sequence
  Synthetic peptide
STPTTEAVESTVATL

SEQ ID NO: 2292 - protein, 15 aa, Artificial sequence
  Synthetic peptide
TPTTEAVESTVATLE

SEQ ID NO: 2293 - protein, 15 aa, Artificial sequence
  Synthetic peptide
PTTEAVESTVATLED

SEQ ID NO: 2294 - protein, 15 aa, Artificial sequence
  Synthetic peptide
TTEAVESTVATLEDS

SEQ ID NO: 2295 - protein, 15 aa, Artificial sequence
  Synthetic peptide
TEAVESTVATLEDSP

SEQ ID NO: 2296 - protein, 15 aa, Artificial sequence
  Synthetic peptide
EAVESTVATLEDSPE

SEQ ID NO: 2297 - protein, 15 aa, Artificial sequence
  Synthetic peptide
AVESTVATLEDSPEV

SEQ ID NO: 2298 - protein, 15 aa, Artificial sequence
  Synthetic peptide
VESTVATLEDSPEVI

SEQ ID NO: 2299 - protein, 15 aa, Artificial sequence
  Synthetic peptide
ESTVATLEDSPEVIE

SEQ ID NO: 2300 - protein, 15 aa, Artificial sequence
  Synthetic peptide
STVATLEDSPEVIES

SEQ ID NO: 2301 - protein, 15 aa, Artificial sequence
  Synthetic peptide
TVATLEDSPEVIESP

SEQ ID NO: 2302 - protein, 15 aa, Artificial sequence
  Synthetic peptide
VATLEDSPEVIESPP

SEQ ID NO: 2303 - protein, 15 aa, Artificial sequence
  Synthetic peptide
ATLEDSPEVIESPPE

SEQ ID NO: 2304 - protein, 15 aa, Artificial sequence
  Synthetic peptide
TLEDSPEVIESPPEI

SEQ ID NO: 2305 - protein, 15 aa, Artificial sequence
  Synthetic peptide
LEDSPEVIESPPEIN

SEQ ID NO: 2306 - protein, 15 aa, Artificial sequence
  Synthetic peptide
EDSPEVIESPPEINT

SEQ ID NO: 2307 - protein, 15 aa, Artificial sequence
  Synthetic peptide
DSPEVIESPPEINTV

SEQ ID NO: 2308 - protein, 15 aa, Artificial sequence
  Synthetic peptide
SPEVIESPPEINTVQ

SEQ ID NO: 2309 - protein, 15 aa, Artificial sequence
  Synthetic peptide
PEVIESPPEINTVQV

SEQ ID NO: 2310 - protein, 15 aa, Artificial sequence
  Synthetic peptide
EVIESPPEINTVQVT

SEQ ID NO: 2311 - protein, 15 aa, Artificial sequence
  Synthetic peptide
VIESPPEINTVQVTS

SEQ ID NO: 2312 - protein, 15 aa, Artificial sequence
  Synthetic peptide
IESPPEINTVQVTST

SEQ ID NO: 2313 - protein, 15 aa, Artificial sequence
  Synthetic peptide
ESPPEINTVQVTSTA

SEQ ID NO: 2314 - protein, 15 aa, Artificial sequence
  Synthetic peptide
SPPEINTVQVTSTAV

SEQ ID NO: 2315 - protein, 16 aa, Artificial sequence
  Synthetic peptide
MAIPPKKNQDKTEIPT

SEQ ID NO: 2316 - protein, 16 aa, Artificial sequence
  Synthetic peptide
AIPPKKNQDKTEIPTI

SEQ ID NO: 2317 - protein, 16 aa, Artificial sequence
  Synthetic peptide
IPPKKNQDKTEIPTIN

SEQ ID NO: 2318 - protein, 16 aa, Artificial sequence
  Synthetic peptide
PPKKNQDKTEIPTINT

SEQ ID NO: 2319 - protein, 16 aa, Artificial sequence
  Synthetic peptide
PKKNQDKTEIPTINTI

SEQ ID NO: 2320 - protein, 16 aa, Artificial sequence
  Synthetic peptide
KKNQDKTEIPTINTIA

SEQ ID NO: 2321 - protein, 16 aa, Artificial sequence
  Synthetic peptide
KNQDKTEIPTINTIAS

SEQ ID NO: 2322 - protein, 16 aa, Artificial sequence
  Synthetic peptide
NQDKTEIPTINTIASG

SEQ ID NO: 2323 - protein, 16 aa, Artificial sequence
  Synthetic peptide
QDKTEIPTINTIASGE

SEQ ID NO: 2324 - protein, 16 aa, Artificial sequence
  Synthetic peptide
DKTEIPTINTIASGEP

SEQ ID NO: 2325 - protein, 16 aa, Artificial sequence
  Synthetic peptide
KTEIPTINTIASGEPT

SEQ ID NO: 2326 - protein, 16 aa, Artificial sequence
  Synthetic peptide
TEIPTINTIASGEPTS

SEQ ID NO: 2327 - protein, 16 aa, Artificial sequence
  Synthetic peptide
EIPTINTIASGEPTST

SEQ ID NO: 2328 - protein, 16 aa, Artificial sequence
  Synthetic peptide
IPTINTIASGEPTSTP

SEQ ID NO: 2329 - protein, 16 aa, Artificial sequence
  Synthetic peptide
PTINTIASGEPTSTPT

SEQ ID NO: 2330 - protein, 16 aa, Artificial sequence
  Synthetic peptide
TINTIASGEPTSTPTT

SEQ ID NO: 2331 - protein, 16 aa, Artificial sequence
  Synthetic peptide
INTIASGEPTSTPTTE

SEQ ID NO: 2332 - protein, 16 aa, Artificial sequence
  Synthetic peptide
NTIASGEPTSTPTTEA

SEQ ID NO: 2333 - protein, 16 aa, Artificial sequence
  Synthetic peptide
TIASGEPTSTPTTEAV

SEQ ID NO: 2334 - protein, 16 aa, Artificial sequence
  Synthetic peptide
IASGEPTSTPTTEAVE

SEQ ID NO: 2335 - protein, 16 aa, Artificial sequence
  Synthetic peptide
ASGEPTSTPTTEAVES

SEQ ID NO: 2336 - protein, 16 aa, Artificial sequence
  Synthetic peptide
SGEPTSTPTTEAVEST

SEQ ID NO: 2337 - protein, 16 aa, Artificial sequence
  Synthetic peptide
GEPTSTPTTEAVESTV

SEQ ID NO: 2338 - protein, 16 aa, Artificial sequence
  Synthetic peptide
EPTSTPTTEAVESTVA

SEQ ID NO: 2339 - protein, 16 aa, Artificial sequence
  Synthetic peptide
PTSTPTTEAVESTVAT

SEQ ID NO: 2340 - protein, 16 aa, Artificial sequence
  Synthetic peptide
TSTPTTEAVESTVATL

SEQ ID NO: 2341 - protein, 16 aa, Artificial sequence
  Synthetic peptide
STPTTEAVESTVATLE

SEQ ID NO: 2342 - protein, 16 aa, Artificial sequence
  Synthetic peptide
TPTTEAVESTVATLED

SEQ ID NO: 2343 - protein, 16 aa, Artificial sequence
  Synthetic peptide
PTTEAVESTVATLEDS

SEQ ID NO: 2344 - protein, 16 aa, Artificial sequence
  Synthetic peptide
TTEAVESTVATLEDSP

SEQ ID NO: 2345 - protein, 16 aa, Artificial sequence
  Synthetic peptide
TEAVESTVATLEDSPE

SEQ ID NO: 2346 - protein, 16 aa, Artificial sequence
  Synthetic peptide
EAVESTVATLEDSPEV

SEQ ID NO: 2347 - protein, 16 aa, Artificial sequence
  Synthetic peptide
AVESTVATLEDSPEVI

SEQ ID NO: 2348 - protein, 16 aa, Artificial sequence
  Synthetic peptide
VESTVATLEDSPEVIE

SEQ ID NO: 2349 - protein, 16 aa, Artificial sequence
  Synthetic peptide
ESTVATLEDSPEVIES

SEQ ID NO: 2350 - protein, 16 aa, Artificial sequence
  Synthetic peptide
STVATLEDSPEVIESP

SEQ ID NO: 2351 - protein, 16 aa, Artificial sequence
  Synthetic peptide
TVATLEDSPEVIESPP

SEQ ID NO: 2352 - protein, 16 aa, Artificial sequence
  Synthetic peptide
VATLEDSPEVIESPPE

SEQ ID NO: 2353 - protein, 16 aa, Artificial sequence
  Synthetic peptide
ATLEDSPEVIESPPEI

SEQ ID NO: 2354 - protein, 16 aa, Artificial sequence
  Synthetic peptide
TLEDSPEVIESPPEIN

SEQ ID NO: 2355 - protein, 16 aa, Artificial sequence
  Synthetic peptide
LEDSPEVIESPPEINT

SEQ ID NO: 2356 - protein, 16 aa, Artificial sequence
  Synthetic peptide
EDSPEVIESPPEINTV

SEQ ID NO: 2357 - protein, 16 aa, Artificial sequence
  Synthetic peptide
DSPEVIESPPEINTVQ

SEQ ID NO: 2358 - protein, 16 aa, Artificial sequence
  Synthetic peptide
SPEVIESPPEINTVQV

SEQ ID NO: 2359 - protein, 16 aa, Artificial sequence
  Synthetic peptide
PEVIESPPEINTVQVT

SEQ ID NO: 2360 - protein, 16 aa, Artificial sequence
  Synthetic peptide
EVIESPPEINTVQVTS

SEQ ID NO: 2361 - protein, 16 aa, Artificial sequence
  Synthetic peptide
VIESPPEINTVQVTST

SEQ ID NO: 2362 - protein, 16 aa, Artificial sequence
  Synthetic peptide
IESPPEINTVQVTSTA

SEQ ID NO: 2363 - protein, 16 aa, Artificial sequence
  Synthetic peptide
ESPPEINTVQVTSTAV

SEQ ID NO: 2364 - protein, 17 aa, Artificial sequence
  Synthetic peptide
MAIPPKKNQDKTEIPTI

SEQ ID NO: 2365 - protein, 17 aa, Artificial sequence
  Synthetic peptide
AIPPKKNQDKTEIPTIN

SEQ ID NO: 2366 - protein, 17 aa, Artificial sequence
  Synthetic peptide
IPPKKNQDKTEIPTINT

SEQ ID NO: 2367 - protein, 17 aa, Artificial sequence
  Synthetic peptide
PPKKNQDKTEIPTINTI

SEQ ID NO: 2368 - protein, 17 aa, Artificial sequence
  Synthetic peptide
PKKNQDKTEIPTINTIA

SEQ ID NO: 2369 - protein, 17 aa, Artificial sequence
  Synthetic peptide
KKNQDKTEIPTINTIAS

SEQ ID NO: 2370 - protein, 17 aa, Artificial sequence
  Synthetic peptide
KNQDKTEIPTINTIASG

SEQ ID NO: 2371 - protein, 17 aa, Artificial sequence
  Synthetic peptide
NQDKTEIPTINTIASGE

SEQ ID NO: 2372 - protein, 17 aa, Artificial sequence
  Synthetic peptide
QDKTEIPTINTIASGEP

SEQ ID NO: 2373 - protein, 17 aa, Artificial sequence
  Synthetic peptide
DKTEIPTINTIASGEPT

SEQ ID NO: 2374 - protein, 17 aa, Artificial sequence
  Synthetic peptide
KTEIPTINTIASGEPTS

SEQ ID NO: 2375 - protein, 17 aa, Artificial sequence
  Synthetic peptide
TEIPTINTIASGEPTST

SEQ ID NO: 2376 - protein, 17 aa, Artificial sequence
  Synthetic peptide
EIPTINTIASGEPTSTP

SEQ ID NO: 2377 - protein, 17 aa, Artificial sequence
  Synthetic peptide
IPTINTIASGEPTSTPT

SEQ ID NO: 2378 - protein, 17 aa, Artificial sequence
  Synthetic peptide
PTINTIASGEPTSTPTT

SEQ ID NO: 2379 - protein, 17 aa, Artificial sequence
  Synthetic peptide
TINTIASGEPTSTPTTE

SEQ ID NO: 2380 - protein, 17 aa, Artificial sequence
  Synthetic peptide
INTIASGEPTSTPTTEA

SEQ ID NO: 2381 - protein, 17 aa, Artificial sequence
  Synthetic peptide
NTIASGEPTSTPTTEAV

SEQ ID NO: 2382 - protein, 17 aa, Artificial sequence
  Synthetic peptide
TIASGEPTSTPTTEAVE

SEQ ID NO: 2383 - protein, 17 aa, Artificial sequence
  Synthetic peptide
IASGEPTSTPTTEAVES

SEQ ID NO: 2384 - protein, 17 aa, Artificial sequence
  Synthetic peptide
ASGEPTSTPTTEAVEST

SEQ ID NO: 2385 - protein, 17 aa, Artificial sequence
  Synthetic peptide
SGEPTSTPTTEAVESTV

SEQ ID NO: 2386 - protein, 17 aa, Artificial sequence
  Synthetic peptide
GEPTSTPTTEAVESTVA

SEQ ID NO: 2387 - protein, 17 aa, Artificial sequence
  Synthetic peptide
EPTSTPTTEAVESTVAT

SEQ ID NO: 2388 - protein, 17 aa, Artificial sequence
  Synthetic peptide
PTSTPTTEAVESTVATL

SEQ ID NO: 2389 - protein, 17 aa, Artificial sequence
  Synthetic peptide
TSTPTTEAVESTVATLE

SEQ ID NO: 2390 - protein, 17 aa, Artificial sequence
  Synthetic peptide
STPTTEAVESTVATLED

SEQ ID NO: 2391 - protein, 17 aa, Artificial sequence
  Synthetic peptide
TPTTEAVESTVATLEDS

SEQ ID NO: 2392 - protein, 17 aa, Artificial sequence
  Synthetic peptide
PTTEAVESTVATLEDSP

SEQ ID NO: 2393 - protein, 17 aa, Artificial sequence
  Synthetic peptide
TTEAVESTVATLEDSPE

SEQ ID NO: 2394 - protein, 17 aa, Artificial sequence
  Synthetic peptide
TEAVESTVATLEDSPEV

SEQ ID NO: 2395 - protein, 17 aa, Artificial sequence
  Synthetic peptide
EAVESTVATLEDSPEVI

SEQ ID NO: 2396 - protein, 17 aa, Artificial sequence
  Synthetic peptide
AVESTVATLEDSPEVIE

SEQ ID NO: 2397 - protein, 17 aa, Artificial sequence
  Synthetic peptide
VESTVATLEDSPEVIES

SEQ ID NO: 2398 - protein, 17 aa, Artificial sequence
  Synthetic peptide
ESTVATLEDSPEVIESP

SEQ ID NO: 2399 - protein, 17 aa, Artificial sequence
  Synthetic peptide
STVATLEDSPEVIESPP

SEQ ID NO: 2400 - protein, 17 aa, Artificial sequence
  Synthetic peptide
TVATLEDSPEVIESPPE

SEQ ID NO: 2401 - protein, 17 aa, Artificial sequence
  Synthetic peptide
VATLEDSPEVIESPPEI

SEQ ID NO: 2402 - protein, 17 aa, Artificial sequence
  Synthetic peptide
ATLEDSPEVIESPPEIN

SEQ ID NO: 2403 - protein, 17 aa, Artificial sequence
  Synthetic peptide
TLEDSPEVIESPPEINT

SEQ ID NO: 2404 - protein, 17 aa, Artificial sequence
  Synthetic peptide
LEDSPEVIESPPEINTV

SEQ ID NO: 2405 - protein, 17 aa, Artificial sequence
  Synthetic peptide
EDSPEVIESPPEINTVQ

SEQ ID NO: 2406 - protein, 17 aa, Artificial sequence
  Synthetic peptide
DSPEVIESPPEINTVQV

SEQ ID NO: 2407 - protein, 17 aa, Artificial sequence
  Synthetic peptide
SPEVIESPPEINTVQVT

SEQ ID NO: 2408 - protein, 17 aa, Artificial sequence
  Synthetic peptide
PEVIESPPEINTVQVTS

SEQ ID NO: 2409 - protein, 17 aa, Artificial sequence
  Synthetic peptide
EVIESPPEINTVQVTST

SEQ ID NO: 2410 - protein, 17 aa, Artificial sequence
  Synthetic peptide
VIESPPEINTVQVTSTA

SEQ ID NO: 2411 - protein, 17 aa, Artificial sequence
  Synthetic peptide
IESPPEINTVQVTSTAV

SEQ ID NO: 2412 - protein, 18 aa, Artificial sequence
  Synthetic peptide
MAIPPKKNQDKTEIPTIN

SEQ ID NO: 2413 - protein, 18 aa, Artificial sequence
  Synthetic peptide
AIPPKKNQDKTEIPTINT

SEQ ID NO: 2414 - protein, 18 aa, Artificial sequence
  Synthetic peptide
IPPKKNQDKTEIPTINTI

SEQ ID NO: 2415 - protein, 18 aa, Artificial sequence
  Synthetic peptide
PPKKNQDKTEIPTINTIA

SEQ ID NO: 2416 - protein, 18 aa, Artificial sequence
  Synthetic peptide
PKKNQDKTEIPTINTIAS

SEQ ID NO: 2417 - protein, 18 aa, Artificial sequence
  Synthetic peptide
KKNQDKTEIPTINTIASG

SEQ ID NO: 2418 - protein, 18 aa, Artificial sequence
  Synthetic peptide
KNQDKTEIPTINTIASGE

SEQ ID NO: 2419 - protein, 18 aa, Artificial sequence
  Synthetic peptide
NQDKTEIPTINTIASGEP

SEQ ID NO: 2420 - protein, 18 aa, Artificial sequence
  Synthetic peptide
QDKTEIPTINTIASGEPT

SEQ ID NO: 2421 - protein, 18 aa, Artificial sequence
  Synthetic peptide
DKTEIPTINTIASGEPTS

SEQ ID NO: 2422 - protein, 18 aa, Artificial sequence
  Synthetic peptide
KTEIPTINTIASGEPTST

SEQ ID NO: 2423 - protein, 18 aa, Artificial sequence
  Synthetic peptide
TEIPTINTIASGEPTSTP

SEQ ID NO: 2424 - protein, 18 aa, Artificial sequence
  Synthetic peptide
EIPTINTIASGEPTSTPT

SEQ ID NO: 2425 - protein, 18 aa, Artificial sequence
  Synthetic peptide
IPTINTIASGEPTSTPTT

SEQ ID NO: 2426 - protein, 18 aa, Artificial sequence
  Synthetic peptide
PTINTIASGEPTSTPTTE

SEQ ID NO: 2427 - protein, 18 aa, Artificial sequence
  Synthetic peptide
TINTIASGEPTSTPTTEA

SEQ ID NO: 2428 - protein, 18 aa, Artificial sequence
  Synthetic peptide
INTIASGEPTSTPTTEAV

SEQ ID NO: 2429 - protein, 18 aa, Artificial sequence
  Synthetic peptide
NTIASGEPTSTPTTEAVE

SEQ ID NO: 2430 - protein, 18 aa, Artificial sequence
  Synthetic peptide
TIASGEPTSTPTTEAVES

SEQ ID NO: 2431 - protein, 18 aa, Artificial sequence
  Synthetic peptide
IASGEPTSTPTTEAVEST

SEQ ID NO: 2432 - protein, 18 aa, Artificial sequence
  Synthetic peptide
ASGEPTSTPTTEAVESTV

SEQ ID NO: 2433 - protein, 18 aa, Artificial sequence
  Synthetic peptide
SGEPTSTPTTEAVESTVA

SEQ ID NO: 2434 - protein, 18 aa, Artificial sequence
  Synthetic peptide
GEPTSTPTTEAVESTVAT

SEQ ID NO: 2435 - protein, 18 aa, Artificial sequence
  Synthetic peptide
EPTSTPTTEAVESTVATL

SEQ ID NO: 2436 - protein, 18 aa, Artificial sequence
  Synthetic peptide
PTSTPTTEAVESTVATLE

SEQ ID NO: 2437 - protein, 18 aa, Artificial sequence
  Synthetic peptide
TSTPTTEAVESTVATLED

SEQ ID NO: 2438 - protein, 18 aa, Artificial sequence
  Synthetic peptide
STPTTEAVESTVATLEDS

SEQ ID NO: 2439 - protein, 18 aa, Artificial sequence
  Synthetic peptide
TPTTEAVESTVATLEDSP

SEQ ID NO: 2440 - protein, 18 aa, Artificial sequence
  Synthetic peptide
PTTEAVESTVATLEDSPE

SEQ ID NO: 2441 - protein, 18 aa, Artificial sequence
  Synthetic peptide
TTEAVESTVATLEDSPEV

SEQ ID NO: 2442 - protein, 18 aa, Artificial sequence
  Synthetic peptide
TEAVESTVATLEDSPEVI

SEQ ID NO: 2443 - protein, 18 aa, Artificial sequence
  Synthetic peptide
EAVESTVATLEDSPEVIE

SEQ ID NO: 2444 - protein, 18 aa, Artificial sequence
  Synthetic peptide
AVESTVATLEDSPEVIES

SEQ ID NO: 2445 - protein, 18 aa, Artificial sequence
  Synthetic peptide
VESTVATLEDSPEVIESP

SEQ ID NO: 2446 - protein, 18 aa, Artificial sequence
  Synthetic peptide
ESTVATLEDSPEVIESPP

SEQ ID NO: 2447 - protein, 18 aa, Artificial sequence
  Synthetic peptide
STVATLEDSPEVIESPPE

SEQ ID NO: 2448 - protein, 18 aa, Artificial sequence
  Synthetic peptide
TVATLEDSPEVIESPPEI

SEQ ID NO: 2449 - protein, 18 aa, Artificial sequence
  Synthetic peptide
VATLEDSPEVIESPPEIN

SEQ ID NO: 2450 - protein, 18 aa, Artificial sequence
  Synthetic peptide
ATLEDSPEVIESPPEINT

SEQ ID NO: 2451 - protein, 18 aa, Artificial sequence
  Synthetic peptide
TLEDSPEVIESPPEINTV

SEQ ID NO: 2452 - protein, 18 aa, Artificial sequence
  Synthetic peptide
LEDSPEVIESPPEINTVQ

SEQ ID NO: 2453 - protein, 18 aa, Artificial sequence
  Synthetic peptide
EDSPEVIESPPEINTVQV

SEQ ID NO: 2454 - protein, 18 aa, Artificial sequence
  Synthetic peptide
DSPEVIESPPEINTVQVT

SEQ ID NO: 2455 - protein, 18 aa, Artificial sequence
  Synthetic peptide
SPEVIESPPEINTVQVTS

SEQ ID NO: 2456 - protein, 18 aa, Artificial sequence
  Synthetic peptide
PEVIESPPEINTVQVTST

SEQ ID NO: 2457 - protein, 18 aa, Artificial sequence
  Synthetic peptide
EVIESPPEINTVQVTSTA

SEQ ID NO: 2458 - protein, 18 aa, Artificial sequence
  Synthetic peptide
VIESPPEINTVQVTSTAV

SEQ ID NO: 2459 - protein, 19 aa, Artificial sequence
  Synthetic peptide
MAIPPKKNQDKTEIPTINT

SEQ ID NO: 2460 - protein, 19 aa, Artificial sequence
  Synthetic peptide
AIPPKKNQDKTEIPTINTI

SEQ ID NO: 2461 - protein, 19 aa, Artificial sequence
  Synthetic peptide
IPPKKNQDKTEIPTINTIA

SEQ ID NO: 2462 - protein, 19 aa, Artificial sequence
  Synthetic peptide
PPKKNQDKTEIPTINTIAS

SEQ ID NO: 2463 - protein, 19 aa, Artificial sequence
  Synthetic peptide
PKKNQDKTEIPTINTIASG

SEQ ID NO: 2464 - protein, 19 aa, Artificial sequence
  Synthetic peptide
KKNQDKTEIPTINTIASGE

SEQ ID NO: 2465 - protein, 19 aa, Artificial sequence
  Synthetic peptide
KNQDKTEIPTINTIASGEP

SEQ ID NO: 2466 - protein, 19 aa, Artificial sequence
  Synthetic peptide
NQDKTEIPTINTIASGEPT

SEQ ID NO: 2467 - protein, 19 aa, Artificial sequence
  Synthetic peptide
QDKTEIPTINTIASGEPTS

SEQ ID NO: 2468 - protein, 19 aa, Artificial sequence
  Synthetic peptide
DKTEIPTINTIASGEPTST

SEQ ID NO: 2469 - protein, 19 aa, Artificial sequence
  Synthetic peptide
KTEIPTINTIASGEPTSTP

SEQ ID NO: 2470 - protein, 19 aa, Artificial sequence
  Synthetic peptide
TEIPTINTIASGEPTSTPT

SEQ ID NO: 2471 - protein, 19 aa, Artificial sequence
  Synthetic peptide
EIPTINTIASGEPTSTPTT

SEQ ID NO: 2472 - protein, 19 aa, Artificial sequence
  Synthetic peptide
IPTINTIASGEPTSTPTTE

SEQ ID NO: 2473 - protein, 19 aa, Artificial sequence
  Synthetic peptide
PTINTIASGEPTSTPTTEA

SEQ ID NO: 2474 - protein, 19 aa, Artificial sequence
  Synthetic peptide
TINTIASGEPTSTPTTEAV

SEQ ID NO: 2475 - protein, 19 aa, Artificial sequence
  Synthetic peptide
INTIASGEPTSTPTTEAVE

SEQ ID NO: 2476 - protein, 19 aa, Artificial sequence
  Synthetic peptide
NTIASGEPTSTPTTEAVES

SEQ ID NO: 2477 - protein, 19 aa, Artificial sequence
  Synthetic peptide
TIASGEPTSTPTTEAVEST

SEQ ID NO: 2478 - protein, 19 aa, Artificial sequence
  Synthetic peptide
IASGEPTSTPTTEAVESTV

SEQ ID NO: 2479 - protein, 19 aa, Artificial sequence
  Synthetic peptide
ASGEPTSTPTTEAVESTVA

SEQ ID NO: 2480 - protein, 19 aa, Artificial sequence
  Synthetic peptide
SGEPTSTPTTEAVESTVAT

SEQ ID NO: 2481 - protein, 19 aa, Artificial sequence
  Synthetic peptide
GEPTSTPTTEAVESTVATL

SEQ ID NO: 2482 - protein, 19 aa, Artificial sequence
  Synthetic peptide
EPTSTPTTEAVESTVATLE

SEQ ID NO: 2483 - protein, 19 aa, Artificial sequence
  Synthetic peptide
PTSTPTTEAVESTVATLED

SEQ ID NO: 2484 - protein, 19 aa, Artificial sequence
  Synthetic peptide
TSTPTTEAVESTVATLEDS

SEQ ID NO: 2485 - protein, 19 aa, Artificial sequence
  Synthetic peptide
STPTTEAVESTVATLEDSP

SEQ ID NO: 2486 - protein, 19 aa, Artificial sequence
  Synthetic peptide
TPTTEAVESTVATLEDSPE

SEQ ID NO: 2487 - protein, 19 aa, Artificial sequence
  Synthetic peptide
PTTEAVESTVATLEDSPEV

SEQ ID NO: 2488 - protein, 19 aa, Artificial sequence
  Synthetic peptide
TTEAVESTVATLEDSPEVI

SEQ ID NO: 2489 - protein, 19 aa, Artificial sequence
  Synthetic peptide
TEAVESTVATLEDSPEVIE

SEQ ID NO: 2490 - protein, 19 aa, Artificial sequence
  Synthetic peptide
EAVESTVATLEDSPEVIES

SEQ ID NO: 2491 - protein, 19 aa, Artificial sequence
  Synthetic peptide
AVESTVATLEDSPEVIESP

SEQ ID NO: 2492 - protein, 19 aa, Artificial sequence
  Synthetic peptide
VESTVATLEDSPEVIESPP

SEQ ID NO: 2493 - protein, 19 aa, Artificial sequence
  Synthetic peptide
ESTVATLEDSPEVIESPPE

SEQ ID NO: 2494 - protein, 19 aa, Artificial sequence
  Synthetic peptide
STVATLEDSPEVIESPPEI

SEQ ID NO: 2495 - protein, 19 aa, Artificial sequence
  Synthetic peptide
TVATLEDSPEVIESPPEIN

SEQ ID NO: 2496 - protein, 19 aa, Artificial sequence
  Synthetic peptide
VATLEDSPEVIESPPEINT

SEQ ID NO: 2497 - protein, 19 aa, Artificial sequence
  Synthetic peptide
ATLEDSPEVIESPPEINTV

SEQ ID NO: 2498 - protein, 19 aa, Artificial sequence
  Synthetic peptide
TLEDSPEVIESPPEINTVQ

SEQ ID NO: 2499 - protein, 19 aa, Artificial sequence
  Synthetic peptide
LEDSPEVIESPPEINTVQV

SEQ ID NO: 2500 - protein, 19 aa, Artificial sequence
  Synthetic peptide
EDSPEVIESPPEINTVQVT

SEQ ID NO: 2501 - protein, 19 aa, Artificial sequence
  Synthetic peptide
DSPEVIESPPEINTVQVTS

SEQ ID NO: 2502 - protein, 19 aa, Artificial sequence
  Synthetic peptide
SPEVIESPPEINTVQVTST

SEQ ID NO: 2503 - protein, 19 aa, Artificial sequence
  Synthetic peptide
PEVIESPPEINTVQVTSTA

SEQ ID NO: 2504 - protein, 19 aa, Artificial sequence
  Synthetic peptide
EVIESPPEINTVQVTSTAV

SEQ ID NO: 2505 - protein, 20 aa, Artificial sequence
  Synthetic peptide
MAIPPKKNQDKTEIPTINTI

SEQ ID NO: 2506 - protein, 20 aa, Artificial sequence
  Synthetic peptide
AIPPKKNQDKTEIPTINTIA

SEQ ID NO: 2507 - protein, 20 aa, Artificial sequence
  Synthetic peptide
IPPKKNQDKTEIPTINTIAS

SEQ ID NO: 2508 - protein, 20 aa, Artificial sequence
  Synthetic peptide
PPKKNQDKTEIPTINTIASG

SEQ ID NO: 2509 - protein, 20 aa, Artificial sequence
  Synthetic peptide
PKKNQDKTEIPTINTIASGE

SEQ ID NO: 2510 - protein, 20 aa, Artificial sequence
  Synthetic peptide
KKNQDKTEIPTINTIASGEP

SEQ ID NO: 2511 - protein, 20 aa, Artificial sequence
  Synthetic peptide
KNQDKTEIPTINTIASGEPT

SEQ ID NO: 2512 - protein, 20 aa, Artificial sequence
  Synthetic peptide
NQDKTEIPTINTIASGEPTS

SEQ ID NO: 2513 - protein, 20 aa, Artificial sequence
  Synthetic peptide
QDKTEIPTINTIASGEPTST

SEQ ID NO: 2514 - protein, 20 aa, Artificial sequence
  Synthetic peptide
DKTEIPTINTIASGEPTSTP

SEQ ID NO: 2515 - protein, 20 aa, Artificial sequence
  Synthetic peptide
KTEIPTINTIASGEPTSTPT

SEQ ID NO: 2516 - protein, 20 aa, Artificial sequence
  Synthetic peptide
TEIPTINTIASGEPTSTPTT

SEQ ID NO: 2517 - protein, 20 aa, Artificial sequence
  Synthetic peptide
EIPTINTIASGEPTSTPTTE

SEQ ID NO: 2518 - protein, 20 aa, Artificial sequence
  Synthetic peptide
IPTINTIASGEPTSTPTTEA

SEQ ID NO: 2519 - protein, 20 aa, Artificial sequence
  Synthetic peptide
PTINTIASGEPTSTPTTEAV

SEQ ID NO: 2520 - protein, 20 aa, Artificial sequence
  Synthetic peptide
TINTIASGEPTSTPTTEAVE

SEQ ID NO: 2521 - protein, 20 aa, Artificial sequence
  Synthetic peptide
INTIASGEPTSTPTTEAVES

SEQ ID NO: 2522 - protein, 20 aa, Artificial sequence
  Synthetic peptide
NTIASGEPTSTPTTEAVEST

SEQ ID NO: 2523 - protein, 20 aa, Artificial sequence
  Synthetic peptide
TIASGEPTSTPTTEAVESTV

SEQ ID NO: 2524 - protein, 20 aa, Artificial sequence
  Synthetic peptide
IASGEPTSTPTTEAVESTVA

SEQ ID NO: 2525 - protein, 20 aa, Artificial sequence
  Synthetic peptide
ASGEPTSTPTTEAVESTVAT

SEQ ID NO: 2526 - protein, 20 aa, Artificial sequence
  Synthetic peptide
SGEPTSTPTTEAVESTVATL

SEQ ID NO: 2527 - protein, 20 aa, Artificial sequence
  Synthetic peptide
GEPTSTPTTEAVESTVATLE

SEQ ID NO: 2528 - protein, 20 aa, Artificial sequence
  Synthetic peptide
EPTSTPTTEAVESTVATLED

SEQ ID NO: 2529 - protein, 20 aa, Artificial sequence
  Synthetic peptide
PTSTPTTEAVESTVATLEDS

SEQ ID NO: 2530 - protein, 20 aa, Artificial sequence
  Synthetic peptide
TSTPTTEAVESTVATLEDSP

SEQ ID NO: 2531 - protein, 20 aa, Artificial sequence
  Synthetic peptide
STPTTEAVESTVATLEDSPE

SEQ ID NO: 2532 - protein, 20 aa, Artificial sequence
  Synthetic peptide
TPTTEAVESTVATLEDSPEV

SEQ ID NO: 2533 - protein, 20 aa, Artificial sequence
  Synthetic peptide
PTTEAVESTVATLEDSPEVI

SEQ ID NO: 2534 - protein, 20 aa, Artificial sequence
  Synthetic peptide
TTEAVESTVATLEDSPEVIE

SEQ ID NO: 2535 - protein, 20 aa, Artificial sequence
  Synthetic peptide
TEAVESTVATLEDSPEVIES

SEQ ID NO: 2536 - protein, 20 aa, Artificial sequence
  Synthetic peptide
EAVESTVATLEDSPEVIESP

SEQ ID NO: 2537 - protein, 20 aa, Artificial sequence
  Synthetic peptide
AVESTVATLEDSPEVIESPP

SEQ ID NO: 2538 - protein, 20 aa, Artificial sequence
  Synthetic peptide
VESTVATLEDSPEVIESPPE

SEQ ID NO: 2539 - protein, 20 aa, Artificial sequence
  Synthetic peptide
ESTVATLEDSPEVIESPPEI

SEQ ID NO: 2540 - protein, 20 aa, Artificial sequence
  Synthetic peptide
STVATLEDSPEVIESPPEIN

SEQ ID NO: 2541 - protein, 20 aa, Artificial sequence
  Synthetic peptide
TVATLEDSPEVIESPPEINT

SEQ ID NO: 2542 - protein, 20 aa, Artificial sequence
  Synthetic peptide
VATLEDSPEVIESPPEINTV

SEQ ID NO: 2543 - protein, 20 aa, Artificial sequence
  Synthetic peptide
ATLEDSPEVIESPPEINTVQ

SEQ ID NO: 2544 - protein, 20 aa, Artificial sequence
  Synthetic peptide
TLEDSPEVIESPPEINTVQV

SEQ ID NO: 2545 - protein, 20 aa, Artificial sequence
  Synthetic peptide
LEDSPEVIESPPEINTVQVT

SEQ ID NO: 2546 - protein, 20 aa, Artificial sequence
  Synthetic peptide
EDSPEVIESPPEINTVQVTS

SEQ ID NO: 2547 - protein, 20 aa, Artificial sequence
  Synthetic peptide
DSPEVIESPPEINTVQVTST

SEQ ID NO: 2548 - protein, 20 aa, Artificial sequence
  Synthetic peptide
SPEVIESPPEINTVQVTSTA

SEQ ID NO: 2549 - protein, 20 aa, Artificial sequence
  Synthetic peptide
PEVIESPPEINTVQVTSTAV

SEQ ID NO: 2550 - protein, 21 aa, Artificial sequence
  Synthetic peptide
MAIPPKKNQDKTEIPTINTIA

SEQ ID NO: 2551 - protein, 21 aa, Artificial sequence
  Synthetic peptide
AIPPKKNQDKTEIPTINTIAS

SEQ ID NO: 2552 - protein, 21 aa, Artificial sequence
  Synthetic peptide
IPPKKNQDKTEIPTINTIASG

SEQ ID NO: 2553 - protein, 21 aa, Artificial sequence
  Synthetic peptide
PPKKNQDKTEIPTINTIASGE

SEQ ID NO: 2554 - protein, 21 aa, Artificial sequence
  Synthetic peptide
PKKNQDKTEIPTINTIASGEP

SEQ ID NO: 2555 - protein, 21 aa, Artificial sequence
  Synthetic peptide
KKNQDKTEIPTINTIASGEPT

SEQ ID NO: 2556 - protein, 21 aa, Artificial sequence
  Synthetic peptide
KNQDKTEIPTINTIASGEPTS

SEQ ID NO: 2557 - protein, 21 aa, Artificial sequence
  Synthetic peptide
NQDKTEIPTINTIASGEPTST

SEQ ID NO: 2558 - protein, 21 aa, Artificial sequence
  Synthetic peptide
QDKTEIPTINTIASGEPTSTP

SEQ ID NO: 2559 - protein, 21 aa, Artificial sequence
  Synthetic peptide
DKTEIPTINTIASGEPTSTPT

SEQ ID NO: 2560 - protein, 21 aa, Artificial sequence
  Synthetic peptide
KTEIPTINTIASGEPTSTPTT

SEQ ID NO: 2561 - protein, 21 aa, Artificial sequence
  Synthetic peptide
TEIPTINTIASGEPTSTPTTE

SEQ ID NO: 2562 - protein, 21 aa, Artificial sequence
  Synthetic peptide
EIPTINTIASGEPTSTPTTEA

SEQ ID NO: 2563 - protein, 21 aa, Artificial sequence
  Synthetic peptide
IPTINTIASGEPTSTPTTEAV

SEQ ID NO: 2564 - protein, 21 aa, Artificial sequence
  Synthetic peptide
PTINTIASGEPTSTPTTEAVE

SEQ ID NO: 2565 - protein, 21 aa, Artificial sequence
  Synthetic peptide
TINTIASGEPTSTPTTEAVES

SEQ ID NO: 2566 - protein, 21 aa, Artificial sequence
  Synthetic peptide
INTIASGEPTSTPTTEAVEST

SEQ ID NO: 2567 - protein, 21 aa, Artificial sequence
  Synthetic peptide
NTIASGEPTSTPTTEAVESTV

SEQ ID NO: 2568 - protein, 21 aa, Artificial sequence
  Synthetic peptide
TIASGEPTSTPTTEAVESTVA

SEQ ID NO: 2569 - protein, 21 aa, Artificial sequence
  Synthetic peptide
IASGEPTSTPTTEAVESTVAT

SEQ ID NO: 2570 - protein, 21 aa, Artificial sequence
  Synthetic peptide
ASGEPTSTPTTEAVESTVATL

SEQ ID NO: 2571 - protein, 21 aa, Artificial sequence
  Synthetic peptide
SGEPTSTPTTEAVESTVATLE

SEQ ID NO: 2572 - protein, 21 aa, Artificial sequence
  Synthetic peptide
GEPTSTPTTEAVESTVATLED

SEQ ID NO: 2573 - protein, 21 aa, Artificial sequence
  Synthetic peptide
EPTSTPTTEAVESTVATLEDS

SEQ ID NO: 2574 - protein, 21 aa, Artificial sequence
  Synthetic peptide
PTSTPTTEAVESTVATLEDSP

SEQ ID NO: 2575 - protein, 21 aa, Artificial sequence
  Synthetic peptide
TSTPTTEAVESTVATLEDSPE

SEQ ID NO: 2576 - protein, 21 aa, Artificial sequence
  Synthetic peptide
STPTTEAVESTVATLEDSPEV

SEQ ID NO: 2577 - protein, 21 aa, Artificial sequence
  Synthetic peptide
TPTTEAVESTVATLEDSPEVI

SEQ ID NO: 2578 - protein, 21 aa, Artificial sequence
  Synthetic peptide
PTTEAVESTVATLEDSPEVIE

SEQ ID NO: 2579 - protein, 21 aa, Artificial sequence
  Synthetic peptide
TTEAVESTVATLEDSPEVIES

SEQ ID NO: 2580 - protein, 21 aa, Artificial sequence
  Synthetic peptide
TEAVESTVATLEDSPEVIESP

SEQ ID NO: 2581 - protein, 21 aa, Artificial sequence
  Synthetic peptide
EAVESTVATLEDSPEVIESPP

SEQ ID NO: 2582 - protein, 21 aa, Artificial sequence
  Synthetic peptide
AVESTVATLEDSPEVIESPPE

SEQ ID NO: 2583 - protein, 21 aa, Artificial sequence
  Synthetic peptide
VESTVATLEDSPEVIESPPEI

SEQ ID NO: 2584 - protein, 21 aa, Artificial sequence
  Synthetic peptide
ESTVATLEDSPEVIESPPEIN

SEQ ID NO: 2585 - protein, 21 aa, Artificial sequence
  Synthetic peptide
STVATLEDSPEVIESPPEINT

SEQ ID NO: 2586 - protein, 21 aa, Artificial sequence
  Synthetic peptide
TVATLEDSPEVIESPPEINTV

SEQ ID NO: 2587 - protein, 21 aa, Artificial sequence
  Synthetic peptide
VATLEDSPEVIESPPEINTVQ

SEQ ID NO: 2588 - protein, 21 aa, Artificial sequence
  Synthetic peptide
ATLEDSPEVIESPPEINTVQV

SEQ ID NO: 2589 - protein, 21 aa, Artificial sequence
  Synthetic peptide
TLEDSPEVIESPPEINTVQVT

SEQ ID NO: 2590 - protein, 21 aa, Artificial sequence
  Synthetic peptide
LEDSPEVIESPPEINTVQVTS

SEQ ID NO: 2591 - protein, 21 aa, Artificial sequence
  Synthetic peptide
EDSPEVIESPPEINTVQVTST

SEQ ID NO: 2592 - protein, 21 aa, Artificial sequence
  Synthetic peptide
DSPEVIESPPEINTVQVTSTA

SEQ ID NO: 2593 - protein, 21 aa, Artificial sequence
  Synthetic peptide
SPEVIESPPEINTVQVTSTAV

SEQ ID NO: 2594 - protein, 22 aa, Artificial sequence
  Synthetic peptide
MAIPPKKNQDKTEIPTINTIAS

SEQ ID NO: 2595 - protein, 22 aa, Artificial sequence
  Synthetic peptide
AIPPKKNQDKTEIPTINTIASG

SEQ ID NO: 2596 - protein, 22 aa, Artificial sequence
  Synthetic peptide
IPPKKNQDKTEIPTINTIASGE

SEQ ID NO: 2597 - protein, 22 aa, Artificial sequence
  Synthetic peptide
PPKKNQDKTEIPTINTIASGEP

SEQ ID NO: 2598 - protein, 22 aa, Artificial sequence
  Synthetic peptide
PKKNQDKTEIPTINTIASGEPT

SEQ ID NO: 2599 - protein, 22 aa, Artificial sequence
  Synthetic peptide
KKNQDKTEIPTINTIASGEPTS

SEQ ID NO: 2600 - protein, 22 aa, Artificial sequence
  Synthetic peptide
KNQDKTEIPTINTIASGEPTST

SEQ ID NO: 2601 - protein, 22 aa, Artificial sequence
  Synthetic peptide
NQDKTEIPTINTIASGEPTSTP

SEQ ID NO: 2602 - protein, 22 aa, Artificial sequence
  Synthetic peptide
QDKTEIPTINTIASGEPTSTPT

SEQ ID NO: 2603 - protein, 22 aa, Artificial sequence
  Synthetic peptide
DKTEIPTINTIASGEPTSTPTT

SEQ ID NO: 2604 - protein, 22 aa, Artificial sequence
  Synthetic peptide
KTEIPTINTIASGEPTSTPTTE

SEQ ID NO: 2605 - protein, 22 aa, Artificial sequence
  Synthetic peptide
TEIPTINTIASGEPTSTPTTEA

SEQ ID NO: 2606 - protein, 22 aa, Artificial sequence
  Synthetic peptide
EIPTINTIASGEPTSTPTTEAV

SEQ ID NO: 2607 - protein, 22 aa, Artificial sequence
  Synthetic peptide
IPTINTIASGEPTSTPTTEAVE

SEQ ID NO: 2608 - protein, 22 aa, Artificial sequence
  Synthetic peptide
PTINTIASGEPTSTPTTEAVES

SEQ ID NO: 2609 - protein, 22 aa, Artificial sequence
  Synthetic peptide
TINTIASGEPTSTPTTEAVEST

SEQ ID NO: 2610 - protein, 22 aa, Artificial sequence
  Synthetic peptide
INTIASGEPTSTPTTEAVESTV

SEQ ID NO: 2611 - protein, 22 aa, Artificial sequence
  Synthetic peptide
NTIASGEPTSTPTTEAVESTVA

SEQ ID NO: 2612 - protein, 22 aa, Artificial sequence
  Synthetic peptide
TIASGEPTSTPTTEAVESTVAT

SEQ ID NO: 2613 - protein, 22 aa, Artificial sequence
  Synthetic peptide
IASGEPTSTPTTEAVESTVATL

SEQ ID NO: 2614 - protein, 22 aa, Artificial sequence
  Synthetic peptide
ASGEPTSTPTTEAVESTVATLE

SEQ ID NO: 2615 - protein, 22 aa, Artificial sequence
  Synthetic peptide
SGEPTSTPTTEAVESTVATLED

SEQ ID NO: 2616 - protein, 22 aa, Artificial sequence
  Synthetic peptide
GEPTSTPTTEAVESTVATLEDS

SEQ ID NO: 2617 - protein, 22 aa, Artificial sequence
  Synthetic peptide
EPTSTPTTEAVESTVATLEDSP

SEQ ID NO: 2618 - protein, 22 aa, Artificial sequence
  Synthetic peptide
PTSTPTTEAVESTVATLEDSPE

SEQ ID NO: 2619 - protein, 22 aa, Artificial sequence
  Synthetic peptide
TSTPTTEAVESTVATLEDSPEV

SEQ ID NO: 2620 - protein, 22 aa, Artificial sequence
  Synthetic peptide
STPTTEAVESTVATLEDSPEVI

SEQ ID NO: 2621 - protein, 22 aa, Artificial sequence
  Synthetic peptide
TPTTEAVESTVATLEDSPEVIE

SEQ ID NO: 2622 - protein, 22 aa, Artificial sequence
  Synthetic peptide
PTTEAVESTVATLEDSPEVIES

SEQ ID NO: 2623 - protein, 22 aa, Artificial sequence
  Synthetic peptide
TTEAVESTVATLEDSPEVIESP

SEQ ID NO: 2624 - protein, 22 aa, Artificial sequence
  Synthetic peptide
TEAVESTVATLEDSPEVIESPP

SEQ ID NO: 2625 - protein, 22 aa, Artificial sequence
  Synthetic peptide
EAVESTVATLEDSPEVIESPPE

SEQ ID NO: 2626 - protein, 22 aa, Artificial sequence
  Synthetic peptide
AVESTVATLEDSPEVIESPPEI

SEQ ID NO: 2627 - protein, 22 aa, Artificial sequence
  Synthetic peptide
VESTVATLEDSPEVIESPPEIN

SEQ ID NO: 2628 - protein, 22 aa, Artificial sequence
  Synthetic peptide
ESTVATLEDSPEVIESPPEINT

SEQ ID NO: 2629 - protein, 22 aa, Artificial sequence
  Synthetic peptide
STVATLEDSPEVIESPPEINTV

SEQ ID NO: 2630 - protein, 22 aa, Artificial sequence
  Synthetic peptide
TVATLEDSPEVIESPPEINTVQ

SEQ ID NO: 2631 - protein, 22 aa, Artificial sequence
  Synthetic peptide
VATLEDSPEVIESPPEINTVQV

SEQ ID NO: 2632 - protein, 22 aa, Artificial sequence
  Synthetic peptide
ATLEDSPEVIESPPEINTVQVT

SEQ ID NO: 2633 - protein, 22 aa, Artificial sequence
  Synthetic peptide
TLEDSPEVIESPPEINTVQVTS

SEQ ID NO: 2634 - protein, 22 aa, Artificial sequence
  Synthetic peptide
LEDSPEVIESPPEINTVQVTST

SEQ ID NO: 2635 - protein, 22 aa, Artificial sequence
  Synthetic peptide
EDSPEVIESPPEINTVQVTSTA

SEQ ID NO: 2636 - protein, 22 aa, Artificial sequence
  Synthetic peptide
DSPEVIESPPEINTVQVTSTAV

SEQ ID NO: 2637 - protein, 23 aa, Artificial sequence
  Synthetic peptide
MAIPPKKNQDKTEIPTINTIASG

SEQ ID NO: 2638 - protein, 23 aa, Artificial sequence
  Synthetic peptide
AIPPKKNQDKTEIPTINTIASGE

SEQ ID NO: 2639 - protein, 23 aa, Artificial sequence
  Synthetic peptide
IPPKKNQDKTEIPTINTIASGEP

SEQ ID NO: 2640 - protein, 23 aa, Artificial sequence
  Synthetic peptide
PPKKNQDKTEIPTINTIASGEPT

SEQ ID NO: 2641 - protein, 23 aa, Artificial sequence
  Synthetic peptide
PKKNQDKTEIPTINTIASGEPTS

SEQ ID NO: 2642 - protein, 23 aa, Artificial sequence
  Synthetic peptide
KKNQDKTEIPTINTIASGEPTST

SEQ ID NO: 2643 - protein, 23 aa, Artificial sequence
  Synthetic peptide
KNQDKTEIPTINTIASGEPTSTP

SEQ ID NO: 2644 - protein, 23 aa, Artificial sequence
  Synthetic peptide
NQDKTEIPTINTIASGEPTSTPT

SEQ ID NO: 2645 - protein, 23 aa, Artificial sequence
  Synthetic peptide
QDKTEIPTINTIASGEPTSTPTT

SEQ ID NO: 2646 - protein, 23 aa, Artificial sequence
  Synthetic peptide
DKTEIPTINTIASGEPTSTPTTE

SEQ ID NO: 2647 - protein, 23 aa, Artificial sequence
  Synthetic peptide
KTEIPTINTIASGEPTSTPTTEA

SEQ ID NO: 2648 - protein, 23 aa, Artificial sequence
  Synthetic peptide
TEIPTINTIASGEPTSTPTTEAV

SEQ ID NO: 2649 - protein, 23 aa, Artificial sequence
  Synthetic peptide
EIPTINTIASGEPTSTPTTEAVE

SEQ ID NO: 2650 - protein, 23 aa, Artificial sequence
  Synthetic peptide
IPTINTIASGEPTSTPTTEAVES

SEQ ID NO: 2651 - protein, 23 aa, Artificial sequence
  Synthetic peptide
PTINTIASGEPTSTPTTEAVEST

SEQ ID NO: 2652 - protein, 23 aa, Artificial sequence
  Synthetic peptide
TINTIASGEPTSTPTTEAVESTV

SEQ ID NO: 2653 - protein, 23 aa, Artificial sequence
  Synthetic peptide
INTIASGEPTSTPTTEAVESTVA

SEQ ID NO: 2654 - protein, 23 aa, Artificial sequence
  Synthetic peptide
NTIASGEPTSTPTTEAVESTVAT

SEQ ID NO: 2655 - protein, 23 aa, Artificial sequence
  Synthetic peptide
TIASGEPTSTPTTEAVESTVATL

SEQ ID NO: 2656 - protein, 23 aa, Artificial sequence
  Synthetic peptide
IASGEPTSTPTTEAVESTVATLE

SEQ ID NO: 2657 - protein, 23 aa, Artificial sequence
  Synthetic peptide
ASGEPTSTPTTEAVESTVATLED

SEQ ID NO: 2658 - protein, 23 aa, Artificial sequence
  Synthetic peptide
SGEPTSTPTTEAVESTVATLEDS

SEQ ID NO: 2659 - protein, 23 aa, Artificial sequence
  Synthetic peptide
GEPTSTPTTEAVESTVATLEDSP

SEQ ID NO: 2660 - protein, 23 aa, Artificial sequence
  Synthetic peptide
EPTSTPTTEAVESTVATLEDSPE

SEQ ID NO: 2661 - protein, 23 aa, Artificial sequence
  Synthetic peptide
PTSTPTTEAVESTVATLEDSPEV

SEQ ID NO: 2662 - protein, 23 aa, Artificial sequence
  Synthetic peptide
TSTPTTEAVESTVATLEDSPEVI

SEQ ID NO: 2663 - protein, 23 aa, Artificial sequence
  Synthetic peptide
STPTTEAVESTVATLEDSPEVIE

SEQ ID NO: 2664 - protein, 23 aa, Artificial sequence
  Synthetic peptide
TPTTEAVESTVATLEDSPEVIES

SEQ ID NO: 2665 - protein, 23 aa, Artificial sequence
  Synthetic peptide
PTTEAVESTVATLEDSPEVIESP

SEQ ID NO: 2666 - protein, 23 aa, Artificial sequence
  Synthetic peptide
TTEAVESTVATLEDSPEVIESPP

SEQ ID NO: 2667 - protein, 23 aa, Artificial sequence
  Synthetic peptide
TEAVESTVATLEDSPEVIESPPE

SEQ ID NO: 2668 - protein, 23 aa, Artificial sequence
  Synthetic peptide
EAVESTVATLEDSPEVIESPPEI

SEQ ID NO: 2669 - protein, 23 aa, Artificial sequence
  Synthetic peptide
AVESTVATLEDSPEVIESPPEIN

SEQ ID NO: 2670 - protein, 23 aa, Artificial sequence
  Synthetic peptide
VESTVATLEDSPEVIESPPEINT

SEQ ID NO: 2671 - protein, 23 aa, Artificial sequence
  Synthetic peptide
ESTVATLEDSPEVIESPPEINTV

SEQ ID NO: 2672 - protein, 23 aa, Artificial sequence
  Synthetic peptide
STVATLEDSPEVIESPPEINTVQ

SEQ ID NO: 2673 - protein, 23 aa, Artificial sequence
  Synthetic peptide
TVATLEDSPEVIESPPEINTVQV

SEQ ID NO: 2674 - protein, 23 aa, Artificial sequence
  Synthetic peptide
VATLEDSPEVIESPPEINTVQVT

SEQ ID NO: 2675 - protein, 23 aa, Artificial sequence
  Synthetic peptide
ATLEDSPEVIESPPEINTVQVTS

SEQ ID NO: 2676 - protein, 23 aa, Artificial sequence
  Synthetic peptide
TLEDSPEVIESPPEINTVQVTST

SEQ ID NO: 2677 - protein, 23 aa, Artificial sequence
  Synthetic peptide
LEDSPEVIESPPEINTVQVTSTA

SEQ ID NO: 2678 - protein, 23 aa, Artificial sequence
  Synthetic peptide
EDSPEVIESPPEINTVQVTSTAV

SEQ ID NO: 2679 - protein, 24 aa, Artificial sequence
  Synthetic peptide
MAIPPKKNQDKTEIPTINTIASGE

SEQ ID NO: 2680 - protein, 24 aa, Artificial sequence
  Synthetic peptide
AIPPKKNQDKTEIPTINTIASGEP

SEQ ID NO: 2681 - protein, 24 aa, Artificial sequence
  Synthetic peptide
IPPKKNQDKTEIPTINTIASGEPT

SEQ ID NO: 2682 - protein, 24 aa, Artificial sequence
  Synthetic peptide
PPKKNQDKTEIPTINTIASGEPTS

SEQ ID NO: 2683 - protein, 24 aa, Artificial sequence
  Synthetic peptide
PKKNQDKTEIPTINTIASGEPTST

SEQ ID NO: 2684 - protein, 24 aa, Artificial sequence
  Synthetic peptide
KKNQDKTEIPTINTIASGEPTSTP

SEQ ID NO: 2685 - protein, 24 aa, Artificial sequence
  Synthetic peptide
KNQDKTEIPTINTIASGEPTSTPT

SEQ ID NO: 2686 - protein, 24 aa, Artificial sequence
  Synthetic peptide
NQDKTEIPTINTIASGEPTSTPTT

SEQ ID NO: 2687 - protein, 24 aa, Artificial sequence
  Synthetic peptide
QDKTEIPTINTIASGEPTSTPTTE

SEQ ID NO: 2688 - protein, 24 aa, Artificial sequence
  Synthetic peptide
DKTEIPTINTIASGEPTSTPTTEA

SEQ ID NO: 2689 - protein, 24 aa, Artificial sequence
  Synthetic peptide
KTEIPTINTIASGEPTSTPTTEAV

SEQ ID NO: 2690 - protein, 24 aa, Artificial sequence
  Synthetic peptide
TEIPTINTIASGEPTSTPTTEAVE

SEQ ID NO: 2691 - protein, 24 aa, Artificial sequence
  Synthetic peptide
EIPTINTIASGEPTSTPTTEAVES

SEQ ID NO: 2692 - protein, 24 aa, Artificial sequence
  Synthetic peptide
IPTINTIASGEPTSTPTTEAVEST

SEQ ID NO: 2693 - protein, 24 aa, Artificial sequence
  Synthetic peptide
PTINTIASGEPTSTPTTEAVESTV

SEQ ID NO: 2694 - protein, 24 aa, Artificial sequence
  Synthetic peptide
TINTIASGEPTSTPTTEAVESTVA

SEQ ID NO: 2695 - protein, 24 aa, Artificial sequence
  Synthetic peptide
INTIASGEPTSTPTTEAVESTVAT

SEQ ID NO: 2696 - protein, 24 aa, Artificial sequence
  Synthetic peptide
NTIASGEPTSTPTTEAVESTVATL

SEQ ID NO: 2697 - protein, 24 aa, Artificial sequence
  Synthetic peptide
TIASGEPTSTPTTEAVESTVATLE

SEQ ID NO: 2698 - protein, 24 aa, Artificial sequence
  Synthetic peptide
IASGEPTSTPTTEAVESTVATLED

SEQ ID NO: 2699 - protein, 24 aa, Artificial sequence
  Synthetic peptide
ASGEPTSTPTTEAVESTVATLEDS

SEQ ID NO: 2700 - protein, 24 aa, Artificial sequence
  Synthetic peptide
SGEPTSTPTTEAVESTVATLEDSP

SEQ ID NO: 2701 - protein, 24 aa, Artificial sequence
  Synthetic peptide
GEPTSTPTTEAVESTVATLEDSPE

SEQ ID NO: 2702 - protein, 24 aa, Artificial sequence
  Synthetic peptide
EPTSTPTTEAVESTVATLEDSPEV

SEQ ID NO: 2703 - protein, 24 aa, Artificial sequence
  Synthetic peptide
PTSTPTTEAVESTVATLEDSPEVI

SEQ ID NO: 2704 - protein, 24 aa, Artificial sequence
  Synthetic peptide
TSTPTTEAVESTVATLEDSPEVIE

SEQ ID NO: 2705 - protein, 24 aa, Artificial sequence
  Synthetic peptide
STPTTEAVESTVATLEDSPEVIES

SEQ ID NO: 2706 - protein, 24 aa, Artificial sequence
  Synthetic peptide
TPTTEAVESTVATLEDSPEVIESP

SEQ ID NO: 2707 - protein, 24 aa, Artificial sequence
  Synthetic peptide
PTTEAVESTVATLEDSPEVIESPP

SEQ ID NO: 2708 - protein, 24 aa, Artificial sequence
  Synthetic peptide
TTEAVESTVATLEDSPEVIESPPE

SEQ ID NO: 2709 - protein, 24 aa, Artificial sequence
  Synthetic peptide
TEAVESTVATLEDSPEVIESPPEI

SEQ ID NO: 2710 - protein, 24 aa, Artificial sequence
  Synthetic peptide
EAVESTVATLEDSPEVIESPPEIN

SEQ ID NO: 2711 - protein, 24 aa, Artificial sequence
  Synthetic peptide
AVESTVATLEDSPEVIESPPEINT

SEQ ID NO: 2712 - protein, 24 aa, Artificial sequence
  Synthetic peptide
VESTVATLEDSPEVIESPPEINTV

SEQ ID NO: 2713 - protein, 24 aa, Artificial sequence
  Synthetic peptide
ESTVATLEDSPEVIESPPEINTVQ

SEQ ID NO: 2714 - protein, 24 aa, Artificial sequence
  Synthetic peptide
STVATLEDSPEVIESPPEINTVQV

SEQ ID NO: 2715 - protein, 24 aa, Artificial sequence
  Synthetic peptide
TVATLEDSPEVIESPPEINTVQVT

SEQ ID NO: 2716 - protein, 24 aa, Artificial sequence
  Synthetic peptide
VATLEDSPEVIESPPEINTVQVTS

SEQ ID NO: 2717 - protein, 24 aa, Artificial sequence
  Synthetic peptide
ATLEDSPEVIESPPEINTVQVTST

SEQ ID NO: 2718 - protein, 24 aa, Artificial sequence
  Synthetic peptide
TLEDSPEVIESPPEINTVQVTSTA

SEQ ID NO: 2719 - protein, 24 aa, Artificial sequence
  Synthetic peptide
LEDSPEVIESPPEINTVQVTSTAV

SEQ ID NO: 2720 - protein, 25 aa, Artificial sequence
  Synthetic peptide
MAIPPKKNQDKTEIPTINTIASGEP

SEQ ID NO: 2721 - protein, 25 aa, Artificial sequence
  Synthetic peptide
AIPPKKNQDKTEIPTINTIASGEPT

SEQ ID NO: 2722 - protein, 25 aa, Artificial sequence
  Synthetic peptide
IPPKKNQDKTEIPTINTIASGEPTS

SEQ ID NO: 2723 - protein, 25 aa, Artificial sequence
  Synthetic peptide
PPKKNQDKTEIPTINTIASGEPTST

SEQ ID NO: 2724 - protein, 25 aa, Artificial sequence
  Synthetic peptide
PKKNQDKTEIPTINTIASGEPTSTP

SEQ ID NO: 2725 - protein, 25 aa, Artificial sequence
  Synthetic peptide
KKNQDKTEIPTINTIASGEPTSTPT

SEQ ID NO: 2726 - protein, 25 aa, Artificial sequence
  Synthetic peptide
KNQDKTEIPTINTIASGEPTSTPTT

SEQ ID NO: 2727 - protein, 25 aa, Artificial sequence
  Synthetic peptide
NQDKTEIPTINTIASGEPTSTPTTE

SEQ ID NO: 2728 - protein, 25 aa, Artificial sequence
  Synthetic peptide
QDKTEIPTINTIASGEPTSTPTTEA

SEQ ID NO: 2729 - protein, 25 aa, Artificial sequence
  Synthetic peptide
DKTEIPTINTIASGEPTSTPTTEAV

SEQ ID NO: 2730 - protein, 25 aa, Artificial sequence
  Synthetic peptide
KTEIPTINTIASGEPTSTPTTEAVE

SEQ ID NO: 2731 - protein, 25 aa, Artificial sequence
  Synthetic peptide
TEIPTINTIASGEPTSTPTTEAVES

SEQ ID NO: 2732 - protein, 25 aa, Artificial sequence
  Synthetic peptide
EIPTINTIASGEPTSTPTTEAVEST

SEQ ID NO: 2733 - protein, 25 aa, Artificial sequence
  Synthetic peptide
IPTINTIASGEPTSTPTTEAVESTV

SEQ ID NO: 2734 - protein, 25 aa, Artificial sequence
  Synthetic peptide
PTINTIASGEPTSTPTTEAVESTVA

SEQ ID NO: 2735 - protein, 25 aa, Artificial sequence
  Synthetic peptide
TINTIASGEPTSTPTTEAVESTVAT

SEQ ID NO: 2736 - protein, 25 aa, Artificial sequence
  Synthetic peptide
INTIASGEPTSTPTTEAVESTVATL

SEQ ID NO: 2737 - protein, 25 aa, Artificial sequence
  Synthetic peptide
NTIASGEPTSTPTTEAVESTVATLE

SEQ ID NO: 2738 - protein, 25 aa, Artificial sequence
  Synthetic peptide
TIASGEPTSTPTTEAVESTVATLED

SEQ ID NO: 2739 - protein, 25 aa, Artificial sequence
  Synthetic peptide
IASGEPTSTPTTEAVESTVATLEDS

SEQ ID NO: 2740 - protein, 25 aa, Artificial sequence
  Synthetic peptide
ASGEPTSTPTTEAVESTVATLEDSP

SEQ ID NO: 2741 - protein, 25 aa, Artificial sequence
  Synthetic peptide
SGEPTSTPTTEAVESTVATLEDSPE

SEQ ID NO: 2742 - protein, 25 aa, Artificial sequence
  Synthetic peptide
GEPTSTPTTEAVESTVATLEDSPEV

SEQ ID NO: 2743 - protein, 25 aa, Artificial sequence
  Synthetic peptide
EPTSTPTTEAVESTVATLEDSPEVI

SEQ ID NO: 2744 - protein, 25 aa, Artificial sequence
  Synthetic peptide
PTSTPTTEAVESTVATLEDSPEVIE

SEQ ID NO: 2745 - protein, 25 aa, Artificial sequence
  Synthetic peptide
TSTPTTEAVESTVATLEDSPEVIES

SEQ ID NO: 2746 - protein, 25 aa, Artificial sequence
  Synthetic peptide
STPTTEAVESTVATLEDSPEVIESP

SEQ ID NO: 2747 - protein, 25 aa, Artificial sequence
  Synthetic peptide
TPTTEAVESTVATLEDSPEVIESPP

SEQ ID NO: 2748 - protein, 25 aa, Artificial sequence
  Synthetic peptide
PTTEAVESTVATLEDSPEVIESPPE

SEQ ID NO: 2749 - protein, 25 aa, Artificial sequence
  Synthetic peptide
TTEAVESTVATLEDSPEVIESPPEI

SEQ ID NO: 2750 - protein, 25 aa, Artificial sequence
  Synthetic peptide
TEAVESTVATLEDSPEVIESPPEIN

SEQ ID NO: 2751 - protein, 25 aa, Artificial sequence
  Synthetic peptide
EAVESTVATLEDSPEVIESPPEINT

SEQ ID NO: 2752 - protein, 25 aa, Artificial sequence
  Synthetic peptide
AVESTVATLEDSPEVIESPPEINTV

SEQ ID NO: 2753 - protein, 25 aa, Artificial sequence
  Synthetic peptide
VESTVATLEDSPEVIESPPEINTVQ

SEQ ID NO: 2754 - protein, 25 aa, Artificial sequence
  Synthetic peptide
ESTVATLEDSPEVIESPPEINTVQV

SEQ ID NO: 2755 - protein, 25 aa, Artificial sequence
  Synthetic peptide
STVATLEDSPEVIESPPEINTVQVT

SEQ ID NO: 2756 - protein, 25 aa, Artificial sequence
  Synthetic peptide
TVATLEDSPEVIESPPEINTVQVTS

SEQ ID NO: 2757 - protein, 25 aa, Artificial sequence
  Synthetic peptide
VATLEDSPEVIESPPEINTVQVTST

SEQ ID NO: 2758 - protein, 25 aa, Artificial sequence
  Synthetic peptide
ATLEDSPEVIESPPEINTVQVTSTA

SEQ ID NO: 2759 - protein, 25 aa, Artificial sequence
  Synthetic peptide
TLEDSPEVIESPPEINTVQVTSTAV

SEQ ID NO: 2760 - protein, 26 aa, Artificial sequence
  Synthetic peptide
MAIPPKKNQDKTEIPTINTIASGEPT

SEQ ID NO: 2761 - protein, 26 aa, Artificial sequence
  Synthetic peptide
AIPPKKNQDKTEIPTINTIASGEPTS

SEQ ID NO: 2762 - protein, 26 aa, Artificial sequence
  Synthetic peptide
IPPKKNQDKTEIPTINTIASGEPTST

SEQ ID NO: 2763 - protein, 26 aa, Artificial sequence
  Synthetic peptide
PPKKNQDKTEIPTINTIASGEPTSTP

SEQ ID NO: 2764 - protein, 26 aa, Artificial sequence
  Synthetic peptide
PKKNQDKTEIPTINTIASGEPTSTPT

SEQ ID NO: 2765 - protein, 26 aa, Artificial sequence
  Synthetic peptide
KKNQDKTEIPTINTIASGEPTSTPTT

SEQ ID NO: 2766 - protein, 26 aa, Artificial sequence
  Synthetic peptide
KNQDKTEIPTINTIASGEPTSTPTTE

SEQ ID NO: 2767 - protein, 26 aa, Artificial sequence
  Synthetic peptide
NQDKTEIPTINTIASGEPTSTPTTEA

SEQ ID NO: 2768 - protein, 26 aa, Artificial sequence
  Synthetic peptide
QDKTEIPTINTIASGEPTSTPTTEAV

SEQ ID NO: 2769 - protein, 26 aa, Artificial sequence
  Synthetic peptide
DKTEIPTINTIASGEPTSTPTTEAVE

SEQ ID NO: 2770 - protein, 26 aa, Artificial sequence
  Synthetic peptide
KTEIPTINTIASGEPTSTPTTEAVES

SEQ ID NO: 2771 - protein, 26 aa, Artificial sequence
  Synthetic peptide
TEIPTINTIASGEPTSTPTTEAVEST

SEQ ID NO: 2772 - protein, 26 aa, Artificial sequence
  Synthetic peptide
EIPTINTIASGEPTSTPTTEAVESTV

SEQ ID NO: 2773 - protein, 26 aa, Artificial sequence
  Synthetic peptide
IPTINTIASGEPTSTPTTEAVESTVA

SEQ ID NO: 2774 - protein, 26 aa, Artificial sequence
  Synthetic peptide
PTINTIASGEPTSTPTTEAVESTVAT

SEQ ID NO: 2775 - protein, 26 aa, Artificial sequence
  Synthetic peptide
TINTIASGEPTSTPTTEAVESTVATL

SEQ ID NO: 2776 - protein, 26 aa, Artificial sequence
  Synthetic peptide
INTIASGEPTSTPTTEAVESTVATLE

SEQ ID NO: 2777 - protein, 26 aa, Artificial sequence
  Synthetic peptide
NTIASGEPTSTPTTEAVESTVATLED

SEQ ID NO: 2778 - protein, 26 aa, Artificial sequence
  Synthetic peptide
TIASGEPTSTPTTEAVESTVATLEDS

SEQ ID NO: 2779 - protein, 26 aa, Artificial sequence
  Synthetic peptide
IASGEPTSTPTTEAVESTVATLEDSP

SEQ ID NO: 2780 - protein, 26 aa, Artificial sequence
  Synthetic peptide
ASGEPTSTPTTEAVESTVATLEDSPE

SEQ ID NO: 2781 - protein, 26 aa, Artificial sequence
  Synthetic peptide
SGEPTSTPTTEAVESTVATLEDSPEV

SEQ ID NO: 2782 - protein, 26 aa, Artificial sequence
  Synthetic peptide
GEPTSTPTTEAVESTVATLEDSPEVI

SEQ ID NO: 2783 - protein, 26 aa, Artificial sequence
  Synthetic peptide
EPTSTPTTEAVESTVATLEDSPEVIE

SEQ ID NO: 2784 - protein, 26 aa, Artificial sequence
  Synthetic peptide
PTSTPTTEAVESTVATLEDSPEVIES

SEQ ID NO: 2785 - protein, 26 aa, Artificial sequence
  Synthetic peptide
TSTPTTEAVESTVATLEDSPEVIESP

SEQ ID NO: 2786 - protein, 26 aa, Artificial sequence
  Synthetic peptide
STPTTEAVESTVATLEDSPEVIESPP

SEQ ID NO: 2787 - protein, 26 aa, Artificial sequence
  Synthetic peptide
TPTTEAVESTVATLEDSPEVIESPPE

SEQ ID NO: 2788 - protein, 26 aa, Artificial sequence
  Synthetic peptide
PTTEAVESTVATLEDSPEVIESPPEI

SEQ ID NO: 2789 - protein, 26 aa, Artificial sequence
  Synthetic peptide
TTEAVESTVATLEDSPEVIESPPEIN

SEQ ID NO: 2790 - protein, 26 aa, Artificial sequence
  Synthetic peptide
TEAVESTVATLEDSPEVIESPPEINT

SEQ ID NO: 2791 - protein, 26 aa, Artificial sequence
  Synthetic peptide
EAVESTVATLEDSPEVIESPPEINTV

SEQ ID NO: 2792 - protein, 26 aa, Artificial sequence
  Synthetic peptide
AVESTVATLEDSPEVIESPPEINTVQ

SEQ ID NO: 2793 - protein, 26 aa, Artificial sequence
  Synthetic peptide
VESTVATLEDSPEVIESPPEINTVQV

SEQ ID NO: 2794 - protein, 26 aa, Artificial sequence
  Synthetic peptide
ESTVATLEDSPEVIESPPEINTVQVT

SEQ ID NO: 2795 - protein, 26 aa, Artificial sequence
  Synthetic peptide
STVATLEDSPEVIESPPEINTVQVTS

SEQ ID NO: 2796 - protein, 26 aa, Artificial sequence
  Synthetic peptide
TVATLEDSPEVIESPPEINTVQVTST

SEQ ID NO: 2797 - protein, 26 aa, Artificial sequence
  Synthetic peptide
VATLEDSPEVIESPPEINTVQVTSTA

SEQ ID NO: 2798 - protein, 26 aa, Artificial sequence
  Synthetic peptide
ATLEDSPEVIESPPEINTVQVTSTAV

SEQ ID NO: 2799 - protein, 27 aa, Artificial sequence
  Synthetic peptide
MAIPPKKNQDKTEIPTINTIASGEPTS

SEQ ID NO: 2800 - protein, 27 aa, Artificial sequence
  Synthetic peptide
AIPPKKNQDKTEIPTINTIASGEPTST

SEQ ID NO: 2801 - protein, 27 aa, Artificial sequence
  Synthetic peptide
IPPKKNQDKTEIPTINTIASGEPTSTP

SEQ ID NO: 2802 - protein, 27 aa, Artificial sequence
  Synthetic peptide
PPKKNQDKTEIPTINTIASGEPTSTPT

SEQ ID NO: 2803 - protein, 27 aa, Artificial sequence
  Synthetic peptide
PKKNQDKTEIPTINTIASGEPTSTPTT

SEQ ID NO: 2804 - protein, 27 aa, Artificial sequence
  Synthetic peptide
KKNQDKTEIPTINTIASGEPTSTPTTE

SEQ ID NO: 2805 - protein, 27 aa, Artificial sequence
  Synthetic peptide
KNQDKTEIPTINTIASGEPTSTPTTEA

SEQ ID NO: 2806 - protein, 27 aa, Artificial sequence
  Synthetic peptide
NQDKTEIPTINTIASGEPTSTPTTEAV

SEQ ID NO: 2807 - protein, 27 aa, Artificial sequence
  Synthetic peptide
QDKTEIPTINTIASGEPTSTPTTEAVE

SEQ ID NO: 2808 - protein, 27 aa, Artificial sequence
  Synthetic peptide
DKTEIPTINTIASGEPTSTPTTEAVES

SEQ ID NO: 2809 - protein, 27 aa, Artificial sequence
  Synthetic peptide
KTEIPTINTIASGEPTSTPTTEAVEST

SEQ ID NO: 2810 - protein, 27 aa, Artificial sequence
  Synthetic peptide
TEIPTINTIASGEPTSTPTTEAVESTV

SEQ ID NO: 2811 - protein, 27 aa, Artificial sequence
  Synthetic peptide
EIPTINTIASGEPTSTPTTEAVESTVA

SEQ ID NO: 2812 - protein, 27 aa, Artificial sequence
  Synthetic peptide
IPTINTIASGEPTSTPTTEAVESTVAT

SEQ ID NO: 2813 - protein, 27 aa, Artificial sequence
  Synthetic peptide
PTINTIASGEPTSTPTTEAVESTVATL

SEQ ID NO: 2814 - protein, 27 aa, Artificial sequence
  Synthetic peptide
TINTIASGEPTSTPTTEAVESTVATLE

SEQ ID NO: 2815 - protein, 27 aa, Artificial sequence
  Synthetic peptide
INTIASGEPTSTPTTEAVESTVATLED

SEQ ID NO: 2816 - protein, 27 aa, Artificial sequence
  Synthetic peptide
NTIASGEPTSTPTTEAVESTVATLEDS

SEQ ID NO: 2817 - protein, 27 aa, Artificial sequence
  Synthetic peptide
TIASGEPTSTPTTEAVESTVATLEDSP

SEQ ID NO: 2818 - protein, 27 aa, Artificial sequence
  Synthetic peptide
IASGEPTSTPTTEAVESTVATLEDSPE

SEQ ID NO: 2819 - protein, 27 aa, Artificial sequence
  Synthetic peptide
ASGEPTSTPTTEAVESTVATLEDSPEV

SEQ ID NO: 2820 - protein, 27 aa, Artificial sequence
  Synthetic peptide
SGEPTSTPTTEAVESTVATLEDSPEVI

SEQ ID NO: 2821 - protein, 27 aa, Artificial sequence
  Synthetic peptide
GEPTSTPTTEAVESTVATLEDSPEVIE

SEQ ID NO: 2822 - protein, 27 aa, Artificial sequence
  Synthetic peptide
EPTSTPTTEAVESTVATLEDSPEVIES

SEQ ID NO: 2823 - protein, 27 aa, Artificial sequence
  Synthetic peptide
PTSTPTTEAVESTVATLEDSPEVIESP

SEQ ID NO: 2824 - protein, 27 aa, Artificial sequence
  Synthetic peptide
TSTPTTEAVESTVATLEDSPEVIESPP

SEQ ID NO: 2825 - protein, 27 aa, Artificial sequence
  Synthetic peptide
STPTTEAVESTVATLEDSPEVIESPPE

SEQ ID NO: 2826 - protein, 27 aa, Artificial sequence
  Synthetic peptide
TPTTEAVESTVATLEDSPEVIESPPEI

SEQ ID NO: 2827 - protein, 27 aa, Artificial sequence
  Synthetic peptide
PTTEAVESTVATLEDSPEVIESPPEIN

SEQ ID NO: 2828 - protein, 27 aa, Artificial sequence
  Synthetic peptide
TTEAVESTVATLEDSPEVIESPPEINT

SEQ ID NO: 2829 - protein, 27 aa, Artificial sequence
  Synthetic peptide
TEAVESTVATLEDSPEVIESPPEINTV

SEQ ID NO: 2830 - protein, 27 aa, Artificial sequence
  Synthetic peptide
EAVESTVATLEDSPEVIESPPEINTVQ

SEQ ID NO: 2831 - protein, 27 aa, Artificial sequence
  Synthetic peptide
AVESTVATLEDSPEVIESPPEINTVQV

SEQ ID NO: 2832 - protein, 27 aa, Artificial sequence
  Synthetic peptide
VESTVATLEDSPEVIESPPEINTVQVT

SEQ ID NO: 2833 - protein, 27 aa, Artificial sequence
  Synthetic peptide
ESTVATLEDSPEVIESPPEINTVQVTS

SEQ ID NO: 2834 - protein, 27 aa, Artificial sequence
  Synthetic peptide
STVATLEDSPEVIESPPEINTVQVTST

SEQ ID NO: 2835 - protein, 27 aa, Artificial sequence
  Synthetic peptide
TVATLEDSPEVIESPPEINTVQVTSTA

SEQ ID NO: 2836 - protein, 27 aa, Artificial sequence
  Synthetic peptide
VATLEDSPEVIESPPEINTVQVTSTAV

SEQ ID NO: 2837 - protein, 28 aa, Artificial sequence
  Synthetic peptide
MAIPPKKNQDKTEIPTINTIASGEPTST

SEQ ID NO: 2838 - protein, 28 aa, Artificial sequence
  Synthetic peptide
AIPPKKNQDKTEIPTINTIASGEPTSTP

SEQ ID NO: 2839 - protein, 28 aa, Artificial sequence
  Synthetic peptide
IPPKKNQDKTEIPTINTIASGEPTSTPT

SEQ ID NO: 2840 - protein, 28 aa, Artificial sequence
  Synthetic peptide
PPKKNQDKTEIPTINTIASGEPTSTPTT

SEQ ID NO: 2841 - protein, 28 aa, Artificial sequence
  Synthetic peptide
PKKNQDKTEIPTINTIASGEPTSTPTTE

SEQ ID NO: 2842 - protein, 28 aa, Artificial sequence
  Synthetic peptide
KKNQDKTEIPTINTIASGEPTSTPTTEA

SEQ ID NO: 2843 - protein, 28 aa, Artificial sequence
  Synthetic peptide
KNQDKTEIPTINTIASGEPTSTPTTEAV

SEQ ID NO: 2844 - protein, 28 aa, Artificial sequence
  Synthetic peptide
NQDKTEIPTINTIASGEPTSTPTTEAVE

SEQ ID NO: 2845 - protein, 28 aa, Artificial sequence
  Synthetic peptide
QDKTEIPTINTIASGEPTSTPTTEAVES

SEQ ID NO: 2846 - protein, 28 aa, Artificial sequence
  Synthetic peptide
DKTEIPTINTIASGEPTSTPTTEAVEST

SEQ ID NO: 2847 - protein, 28 aa, Artificial sequence
  Synthetic peptide
KTEIPTINTIASGEPTSTPTTEAVESTV

SEQ ID NO: 2848 - protein, 28 aa, Artificial sequence
  Synthetic peptide
TEIPTINTIASGEPTSTPTTEAVESTVA

SEQ ID NO: 2849 - protein, 28 aa, Artificial sequence
  Synthetic peptide
EIPTINTIASGEPTSTPTTEAVESTVAT

SEQ ID NO: 2850 - protein, 28 aa, Artificial sequence
  Synthetic peptide
IPTINTIASGEPTSTPTTEAVESTVATL

SEQ ID NO: 2851 - protein, 28 aa, Artificial sequence
  Synthetic peptide
PTINTIASGEPTSTPTTEAVESTVATLE

SEQ ID NO: 2852 - protein, 28 aa, Artificial sequence
  Synthetic peptide
TINTIASGEPTSTPTTEAVESTVATLED

SEQ ID NO: 2853 - protein, 28 aa, Artificial sequence
  Synthetic peptide
INTIASGEPTSTPTTEAVESTVATLEDS

SEQ ID NO: 2854 - protein, 28 aa, Artificial sequence
  Synthetic peptide
NTIASGEPTSTPTTEAVESTVATLEDSP

SEQ ID NO: 2855 - protein, 28 aa, Artificial sequence
  Synthetic peptide
TIASGEPTSTPTTEAVESTVATLEDSPE

SEQ ID NO: 2856 - protein, 28 aa, Artificial sequence
  Synthetic peptide
IASGEPTSTPTTEAVESTVATLEDSPEV

SEQ ID NO: 2857 - protein, 28 aa, Artificial sequence
  Synthetic peptide
ASGEPTSTPTTEAVESTVATLEDSPEVI

SEQ ID NO: 2858 - protein, 28 aa, Artificial sequence
  Synthetic peptide
SGEPTSTPTTEAVESTVATLEDSPEVIE

SEQ ID NO: 2859 - protein, 28 aa, Artificial sequence
  Synthetic peptide
GEPTSTPTTEAVESTVATLEDSPEVIES

SEQ ID NO: 2860 - protein, 28 aa, Artificial sequence
  Synthetic peptide
EPTSTPTTEAVESTVATLEDSPEVIESP

SEQ ID NO: 2861 - protein, 28 aa, Artificial sequence
  Synthetic peptide
PTSTPTTEAVESTVATLEDSPEVIESPP

SEQ ID NO: 2862 - protein, 28 aa, Artificial sequence
  Synthetic peptide
TSTPTTEAVESTVATLEDSPEVIESPPE

SEQ ID NO: 2863 - protein, 28 aa, Artificial sequence
  Synthetic peptide
STPTTEAVESTVATLEDSPEVIESPPEI

SEQ ID NO: 2864 - protein, 28 aa, Artificial sequence
  Synthetic peptide
TPTTEAVESTVATLEDSPEVIESPPEIN

SEQ ID NO: 2865 - protein, 28 aa, Artificial sequence
  Synthetic peptide
PTTEAVESTVATLEDSPEVIESPPEINT

SEQ ID NO: 2866 - protein, 28 aa, Artificial sequence
  Synthetic peptide
TTEAVESTVATLEDSPEVIESPPEINTV

SEQ ID NO: 2867 - protein, 28 aa, Artificial sequence
  Synthetic peptide
TEAVESTVATLEDSPEVIESPPEINTVQ

SEQ ID NO: 2868 - protein, 28 aa, Artificial sequence
  Synthetic peptide
EAVESTVATLEDSPEVIESPPEINTVQV

SEQ ID NO: 2869 - protein, 28 aa, Artificial sequence
  Synthetic peptide
AVESTVATLEDSPEVIESPPEINTVQVT

SEQ ID NO: 2870 - protein, 28 aa, Artificial sequence
  Synthetic peptide
VESTVATLEDSPEVIESPPEINTVQVTS

SEQ ID NO: 2871 - protein, 28 aa, Artificial sequence
  Synthetic peptide
ESTVATLEDSPEVIESPPEINTVQVTST

SEQ ID NO: 2872 - protein, 28 aa, Artificial sequence
  Synthetic peptide
STVATLEDSPEVIESPPEINTVQVTSTA

SEQ ID NO: 2873 - protein, 28 aa, Artificial sequence
  Synthetic peptide
TVATLEDSPEVIESPPEINTVQVTSTAV

SEQ ID NO: 2874 - protein, 29 aa, Artificial sequence
  Synthetic peptide
MAIPPKKNQDKTEIPTINTIASGEPTSTP

SEQ ID NO: 2875 - protein, 29 aa, Artificial sequence
  Synthetic peptide
AIPPKKNQDKTEIPTINTIASGEPTSTPT

SEQ ID NO: 2876 - protein, 29 aa, Artificial sequence
  Synthetic peptide
IPPKKNQDKTEIPTINTIASGEPTSTPTT

SEQ ID NO: 2877 - protein, 29 aa, Artificial sequence
  Synthetic peptide
PPKKNQDKTEIPTINTIASGEPTSTPTTE

SEQ ID NO: 2878 - protein, 29 aa, Artificial sequence
  Synthetic peptide
PKKNQDKTEIPTINTIASGEPTSTPTTEA

SEQ ID NO: 2879 - protein, 29 aa, Artificial sequence
  Synthetic peptide
KKNQDKTEIPTINTIASGEPTSTPTTEAV

SEQ ID NO: 2880 - protein, 29 aa, Artificial sequence
  Synthetic peptide
KNQDKTEIPTINTIASGEPTSTPTTEAVE

SEQ ID NO: 2881 - protein, 29 aa, Artificial sequence
  Synthetic peptide
NQDKTEIPTINTIASGEPTSTPTTEAVES

SEQ ID NO: 2882 - protein, 29 aa, Artificial sequence
  Synthetic peptide
QDKTEIPTINTIASGEPTSTPTTEAVEST

SEQ ID NO: 2883 - protein, 29 aa, Artificial sequence
  Synthetic peptide
DKTEIPTINTIASGEPTSTPTTEAVESTV

SEQ ID NO: 2884 - protein, 29 aa, Artificial sequence
  Synthetic peptide
KTEIPTINTIASGEPTSTPTTEAVESTVA

SEQ ID NO: 2885 - protein, 29 aa, Artificial sequence
  Synthetic peptide
TEIPTINTIASGEPTSTPTTEAVESTVAT

SEQ ID NO: 2886 - protein, 29 aa, Artificial sequence
  Synthetic peptide
EIPTINTIASGEPTSTPTTEAVESTVATL

SEQ ID NO: 2887 - protein, 29 aa, Artificial sequence
  Synthetic peptide
IPTINTIASGEPTSTPTTEAVESTVATLE

SEQ ID NO: 2888 - protein, 29 aa, Artificial sequence
  Synthetic peptide
PTINTIASGEPTSTPTTEAVESTVATLED

SEQ ID NO: 2889 - protein, 29 aa, Artificial sequence
  Synthetic peptide
TINTIASGEPTSTPTTEAVESTVATLEDS

SEQ ID NO: 2890 - protein, 29 aa, Artificial sequence
  Synthetic peptide
INTIASGEPTSTPTTEAVESTVATLEDSP

SEQ ID NO: 2891 - protein, 29 aa, Artificial sequence
  Synthetic peptide
NTIASGEPTSTPTTEAVESTVATLEDSPE

SEQ ID NO: 2892 - protein, 29 aa, Artificial sequence
  Synthetic peptide
TIASGEPTSTPTTEAVESTVATLEDSPEV

SEQ ID NO: 2893 - protein, 29 aa, Artificial sequence
  Synthetic peptide
IASGEPTSTPTTEAVESTVATLEDSPEVI

SEQ ID NO: 2894 - protein, 29 aa, Artificial sequence
  Synthetic peptide
ASGEPTSTPTTEAVESTVATLEDSPEVIE

SEQ ID NO: 2895 - protein, 29 aa, Artificial sequence
  Synthetic peptide
SGEPTSTPTTEAVESTVATLEDSPEVIES

SEQ ID NO: 2896 - protein, 29 aa, Artificial sequence
  Synthetic peptide
GEPTSTPTTEAVESTVATLEDSPEVIESP

SEQ ID NO: 2897 - protein, 29 aa, Artificial sequence
  Synthetic peptide
EPTSTPTTEAVESTVATLEDSPEVIESPP

SEQ ID NO: 2898 - protein, 29 aa, Artificial sequence
  Synthetic peptide
PTSTPTTEAVESTVATLEDSPEVIESPPE

SEQ ID NO: 2899 - protein, 29 aa, Artificial sequence
  Synthetic peptide
TSTPTTEAVESTVATLEDSPEVIESPPEI

SEQ ID NO: 2900 - protein, 29 aa, Artificial sequence
  Synthetic peptide
STPTTEAVESTVATLEDSPEVIESPPEIN

SEQ ID NO: 2901 - protein, 29 aa, Artificial sequence
  Synthetic peptide
TPTTEAVESTVATLEDSPEVIESPPEINT

SEQ ID NO: 2902 - protein, 29 aa, Artificial sequence
  Synthetic peptide
PTTEAVESTVATLEDSPEVIESPPEINTV

SEQ ID NO: 2903 - protein, 29 aa, Artificial sequence
  Synthetic peptide
TTEAVESTVATLEDSPEVIESPPEINTVQ

SEQ ID NO: 2904 - protein, 29 aa, Artificial sequence
  Synthetic peptide
TEAVESTVATLEDSPEVIESPPEINTVQV

SEQ ID NO: 2905 - protein, 29 aa, Artificial sequence
  Synthetic peptide
EAVESTVATLEDSPEVIESPPEINTVQVT

SEQ ID NO: 2906 - protein, 29 aa, Artificial sequence
  Synthetic peptide
AVESTVATLEDSPEVIESPPEINTVQVTS

SEQ ID NO: 2907 - protein, 29 aa, Artificial sequence
  Synthetic peptide
VESTVATLEDSPEVIESPPEINTVQVTST

SEQ ID NO: 2908 - protein, 29 aa, Artificial sequence
  Synthetic peptide
ESTVATLEDSPEVIESPPEINTVQVTSTA

SEQ ID NO: 2909 - protein, 29 aa, Artificial sequence
  Synthetic peptide
STVATLEDSPEVIESPPEINTVQVTSTAV

SEQ ID NO: 2910 - protein, 30 aa, Artificial sequence
  Synthetic peptide
MAIPPKKNQDKTEIPTINTIASGEPTSTPT

SEQ ID NO: 2911 - protein, 30 aa, Artificial sequence
  Synthetic peptide
AIPPKKNQDKTEIPTINTIASGEPTSTPTT

SEQ ID NO: 2912 - protein, 30 aa, Artificial sequence
  Synthetic peptide
IPPKKNQDKTEIPTINTIASGEPTSTPTTE

SEQ ID NO: 2913 - protein, 30 aa, Artificial sequence
  Synthetic peptide
PPKKNQDKTEIPTINTIASGEPTSTPTTEA

SEQ ID NO: 2914 - protein, 30 aa, Artificial sequence
  Synthetic peptide
PKKNQDKTEIPTINTIASGEPTSTPTTEAV

SEQ ID NO: 2915 - protein, 30 aa, Artificial sequence
  Synthetic peptide
KKNQDKTEIPTINTIASGEPTSTPTTEAVE

SEQ ID NO: 2916 - protein, 30 aa, Artificial sequence
  Synthetic peptide
KNQDKTEIPTINTIASGEPTSTPTTEAVES

SEQ ID NO: 2917 - protein, 30 aa, Artificial sequence
  Synthetic peptide
NQDKTEIPTINTIASGEPTSTPTTEAVEST

SEQ ID NO: 2918 - protein, 30 aa, Artificial sequence
  Synthetic peptide
QDKTEIPTINTIASGEPTSTPTTEAVESTV

SEQ ID NO: 2919 - protein, 30 aa, Artificial sequence
  Synthetic peptide
DKTEIPTINTIASGEPTSTPTTEAVESTVA

SEQ ID NO: 2920 - protein, 30 aa, Artificial sequence
  Synthetic peptide
KTEIPTINTIASGEPTSTPTTEAVESTVAT

SEQ ID NO: 2921 - protein, 30 aa, Artificial sequence
  Synthetic peptide
TEIPTINTIASGEPTSTPTTEAVESTVATL

SEQ ID NO: 2922 - protein, 30 aa, Artificial sequence
  Synthetic peptide
EIPTINTIASGEPTSTPTTEAVESTVATLE

SEQ ID NO: 2923 - protein, 30 aa, Artificial sequence
  Synthetic peptide
IPTINTIASGEPTSTPTTEAVESTVATLED

SEQ ID NO: 2924 - protein, 30 aa, Artificial sequence
  Synthetic peptide
PTINTIASGEPTSTPTTEAVESTVATLEDS

SEQ ID NO: 2925 - protein, 30 aa, Artificial sequence
  Synthetic peptide
TINTIASGEPTSTPTTEAVESTVATLEDSP

SEQ ID NO: 2926 - protein, 30 aa, Artificial sequence
  Synthetic peptide
INTIASGEPTSTPTTEAVESTVATLEDSPE

SEQ ID NO: 2927 - protein, 30 aa, Artificial sequence
  Synthetic peptide
NTIASGEPTSTPTTEAVESTVATLEDSPEV

SEQ ID NO: 2928 - protein, 30 aa, Artificial sequence
  Synthetic peptide
TIASGEPTSTPTTEAVESTVATLEDSPEVI

SEQ ID NO: 2929 - protein, 30 aa, Artificial sequence
  Synthetic peptide
IASGEPTSTPTTEAVESTVATLEDSPEVIE

SEQ ID NO: 2930 - protein, 30 aa, Artificial sequence
  Synthetic peptide
ASGEPTSTPTTEAVESTVATLEDSPEVIES

SEQ ID NO: 2931 - protein, 30 aa, Artificial sequence
  Synthetic peptide
SGEPTSTPTTEAVESTVATLEDSPEVIESP

SEQ ID NO: 2932 - protein, 30 aa, Artificial sequence
  Synthetic peptide
GEPTSTPTTEAVESTVATLEDSPEVIESPP

SEQ ID NO: 2933 - protein, 30 aa, Artificial sequence
  Synthetic peptide
EPTSTPTTEAVESTVATLEDSPEVIESPPE

SEQ ID NO: 2934 - protein, 30 aa, Artificial sequence
  Synthetic peptide
PTSTPTTEAVESTVATLEDSPEVIESPPEI

SEQ ID NO: 2935 - protein, 30 aa, Artificial sequence
  Synthetic peptide
TSTPTTEAVESTVATLEDSPEVIESPPEIN

SEQ ID NO: 2936 - protein, 30 aa, Artificial sequence
  Synthetic peptide
STPTTEAVESTVATLEDSPEVIESPPEINT

SEQ ID NO: 2937 - protein, 30 aa, Artificial sequence
  Synthetic peptide
TPTTEAVESTVATLEDSPEVIESPPEINTV

SEQ ID NO: 2938 - protein, 30 aa, Artificial sequence
  Synthetic peptide
PTTEAVESTVATLEDSPEVIESPPEINTVQ

SEQ ID NO: 2939 - protein, 30 aa, Artificial sequence
  Synthetic peptide
TTEAVESTVATLEDSPEVIESPPEINTVQV

SEQ ID NO: 2940 - protein, 30 aa, Artificial sequence
  Synthetic peptide
TEAVESTVATLEDSPEVIESPPEINTVQVT

SEQ ID NO: 2941 - protein, 30 aa, Artificial sequence
  Synthetic peptide
EAVESTVATLEDSPEVIESPPEINTVQVTS

SEQ ID NO: 2942 - protein, 30 aa, Artificial sequence
  Synthetic peptide
AVESTVATLEDSPEVIESPPEINTVQVTST

SEQ ID NO: 2943 - protein, 30 aa, Artificial sequence
  Synthetic peptide
VESTVATLEDSPEVIESPPEINTVQVTSTA

SEQ ID NO: 2944 - protein, 30 aa, Artificial sequence
  Synthetic peptide
ESTVATLEDSPEVIESPPEINTVQVTSTAV

SEQ ID NO: 2945 - protein, 31 aa, Artificial sequence
  Synthetic peptide
MAIPPKKNQDKTEIPTINTIASGEPTSTPTT

SEQ ID NO: 2946 - protein, 31 aa, Artificial sequence
  Synthetic peptide
AIPPKKNQDKTEIPTINTIASGEPTSTPTTE

SEQ ID NO: 2947 - protein, 31 aa, Artificial sequence
  Synthetic peptide
IPPKKNQDKTEIPTINTIASGEPTSTPTTEA

SEQ ID NO: 2948 - protein, 31 aa, Artificial sequence
  Synthetic peptide
PPKKNQDKTEIPTINTIASGEPTSTPTTEAV

SEQ ID NO: 2949 - protein, 31 aa, Artificial sequence
  Synthetic peptide
PKKNQDKTEIPTINTIASGEPTSTPTTEAVE

SEQ ID NO: 2950 - protein, 31 aa, Artificial sequence
  Synthetic peptide
KKNQDKTEIPTINTIASGEPTSTPTTEAVES

SEQ ID NO: 2951 - protein, 31 aa, Artificial sequence
  Synthetic peptide
KNQDKTEIPTINTIASGEPTSTPTTEAVEST

SEQ ID NO: 2952 - protein, 31 aa, Artificial sequence
  Synthetic peptide
NQDKTEIPTINTIASGEPTSTPTTEAVESTV

SEQ ID NO: 2953 - protein, 31 aa, Artificial sequence
  Synthetic peptide
QDKTEIPTINTIASGEPTSTPTTEAVESTVA

SEQ ID NO: 2954 - protein, 31 aa, Artificial sequence
  Synthetic peptide
DKTEIPTINTIASGEPTSTPTTEAVESTVAT

SEQ ID NO: 2955 - protein, 31 aa, Artificial sequence
  Synthetic peptide
KTEIPTINTIASGEPTSTPTTEAVESTVATL

SEQ ID NO: 2956 - protein, 31 aa, Artificial sequence
  Synthetic peptide
TEIPTINTIASGEPTSTPTTEAVESTVATLE

SEQ ID NO: 2957 - protein, 31 aa, Artificial sequence
  Synthetic peptide
EIPTINTIASGEPTSTPTTEAVESTVATLED

SEQ ID NO: 2958 - protein, 31 aa, Artificial sequence
  Synthetic peptide
IPTINTIASGEPTSTPTTEAVESTVATLEDS

SEQ ID NO: 2959 - protein, 31 aa, Artificial sequence
  Synthetic peptide
PTINTIASGEPTSTPTTEAVESTVATLEDSP

SEQ ID NO: 2960 - protein, 31 aa, Artificial sequence
  Synthetic peptide
TINTIASGEPTSTPTTEAVESTVATLEDSPE

SEQ ID NO: 2961 - protein, 31 aa, Artificial sequence
  Synthetic peptide
INTIASGEPTSTPTTEAVESTVATLEDSPEV

SEQ ID NO: 2962 - protein, 31 aa, Artificial sequence
  Synthetic peptide
NTIASGEPTSTPTTEAVESTVATLEDSPEVI

SEQ ID NO: 2963 - protein, 31 aa, Artificial sequence
  Synthetic peptide
TIASGEPTSTPTTEAVESTVATLEDSPEVIE

SEQ ID NO: 2964 - protein, 31 aa, Artificial sequence
  Synthetic peptide
IASGEPTSTPTTEAVESTVATLEDSPEVIES

SEQ ID NO: 2965 - protein, 31 aa, Artificial sequence
  Synthetic peptide
ASGEPTSTPTTEAVESTVATLEDSPEVIESP

SEQ ID NO: 2966 - protein, 31 aa, Artificial sequence
  Synthetic peptide
SGEPTSTPTTEAVESTVATLEDSPEVIESPP

SEQ ID NO: 2967 - protein, 31 aa, Artificial sequence
  Synthetic peptide
GEPTSTPTTEAVESTVATLEDSPEVIESPPE

SEQ ID NO: 2968 - protein, 31 aa, Artificial sequence
  Synthetic peptide
EPTSTPTTEAVESTVATLEDSPEVIESPPEI

SEQ ID NO: 2969 - protein, 31 aa, Artificial sequence
  Synthetic peptide
PTSTPTTEAVESTVATLEDSPEVIESPPEIN

SEQ ID NO: 2970 - protein, 31 aa, Artificial sequence
  Synthetic peptide
TSTPTTEAVESTVATLEDSPEVIESPPEINT

SEQ ID NO: 2971 - protein, 31 aa, Artificial sequence
  Synthetic peptide
STPTTEAVESTVATLEDSPEVIESPPEINTV

SEQ ID NO: 2972 - protein, 31 aa, Artificial sequence
  Synthetic peptide
TPTTEAVESTVATLEDSPEVIESPPEINTVQ

SEQ ID NO: 2973 - protein, 31 aa, Artificial sequence
  Synthetic peptide
PTTEAVESTVATLEDSPEVIESPPEINTVQV

SEQ ID NO: 2974 - protein, 31 aa, Artificial sequence
  Synthetic peptide
TTEAVESTVATLEDSPEVIESPPEINTVQVT

SEQ ID NO: 2975 - protein, 31 aa, Artificial sequence
  Synthetic peptide
TEAVESTVATLEDSPEVIESPPEINTVQVTS

SEQ ID NO: 2976 - protein, 31 aa, Artificial sequence
  Synthetic peptide
EAVESTVATLEDSPEVIESPPEINTVQVTST

SEQ ID NO: 2977 - protein, 31 aa, Artificial sequence
  Synthetic peptide
AVESTVATLEDSPEVIESPPEINTVQVTSTA

SEQ ID NO: 2978 - protein, 31 aa, Artificial sequence
  Synthetic peptide
VESTVATLEDSPEVIESPPEINTVQVTSTAV

SEQ ID NO: 2979 - protein, 32 aa, Artificial sequence
  Synthetic peptide
MAIPPKKNQDKTEIPTINTIASGEPTSTPTTE

SEQ ID NO: 2980 - protein, 32 aa, Artificial sequence
  Synthetic peptide
AIPPKKNQDKTEIPTINTIASGEPTSTPTTEA

SEQ ID NO: 2981 - protein, 32 aa, Artificial sequence
  Synthetic peptide
IPPKKNQDKTEIPTINTIASGEPTSTPTTEAV

SEQ ID NO: 2982 - protein, 32 aa, Artificial sequence
  Synthetic peptide
PPKKNQDKTEIPTINTIASGEPTSTPTTEAVE

SEQ ID NO: 2983 - protein, 32 aa, Artificial sequence
  Synthetic peptide
PKKNQDKTEIPTINTIASGEPTSTPTTEAVES

SEQ ID NO: 2984 - protein, 32 aa, Artificial sequence
  Synthetic peptide
KKNQDKTEIPTINTIASGEPTSTPTTEAVEST

SEQ ID NO: 2985 - protein, 32 aa, Artificial sequence
  Synthetic peptide
KNQDKTEIPTINTIASGEPTSTPTTEAVESTV

SEQ ID NO: 2986 - protein, 32 aa, Artificial sequence
  Synthetic peptide
NQDKTEIPTINTIASGEPTSTPTTEAVESTVA

SEQ ID NO: 2987 - protein, 32 aa, Artificial sequence
  Synthetic peptide
QDKTEIPTINTIASGEPTSTPTTEAVESTVAT

SEQ ID NO: 2988 - protein, 32 aa, Artificial sequence
  Synthetic peptide
DKTEIPTINTIASGEPTSTPTTEAVESTVATL

SEQ ID NO: 2989 - protein, 32 aa, Artificial sequence
  Synthetic peptide
KTEIPTINTIASGEPTSTPTTEAVESTVATLE

SEQ ID NO: 2990 - protein, 32 aa, Artificial sequence
  Synthetic peptide
TEIPTINTIASGEPTSTPTTEAVESTVATLED

SEQ ID NO: 2991 - protein, 32 aa, Artificial sequence
  Synthetic peptide
EIPTINTIASGEPTSTPTTEAVESTVATLEDS

SEQ ID NO: 2992 - protein, 32 aa, Artificial sequence
  Synthetic peptide
IPTINTIASGEPTSTPTTEAVESTVATLEDSP

SEQ ID NO: 2993 - protein, 32 aa, Artificial sequence
  Synthetic peptide
PTINTIASGEPTSTPTTEAVESTVATLEDSPE

SEQ ID NO: 2994 - protein, 32 aa, Artificial sequence
  Synthetic peptide
TINTIASGEPTSTPTTEAVESTVATLEDSPEV

SEQ ID NO: 2995 - protein, 32 aa, Artificial sequence
  Synthetic peptide
INTIASGEPTSTPTTEAVESTVATLEDSPEVI

SEQ ID NO: 2996 - protein, 32 aa, Artificial sequence
  Synthetic peptide
NTIASGEPTSTPTTEAVESTVATLEDSPEVIE

SEQ ID NO: 2997 - protein, 32 aa, Artificial sequence
  Synthetic peptide
TIASGEPTSTPTTEAVESTVATLEDSPEVIES

SEQ ID NO: 2998 - protein, 32 aa, Artificial sequence
  Synthetic peptide
IASGEPTSTPTTEAVESTVATLEDSPEVIESP

SEQ ID NO: 2999 - protein, 32 aa, Artificial sequence
  Synthetic peptide
ASGEPTSTPTTEAVESTVATLEDSPEVIESPP

SEQ ID NO: 3000 - protein, 32 aa, Artificial sequence
  Synthetic peptide
SGEPTSTPTTEAVESTVATLEDSPEVIESPPE

SEQ ID NO: 3001 - protein, 32 aa, Artificial sequence
  Synthetic peptide
GEPTSTPTTEAVESTVATLEDSPEVIESPPEI

SEQ ID NO: 3002 - protein, 32 aa, Artificial sequence
  Synthetic peptide
EPTSTPTTEAVESTVATLEDSPEVIESPPEIN

SEQ ID NO: 3003 - protein, 32 aa, Artificial sequence
  Synthetic peptide
PTSTPTTEAVESTVATLEDSPEVIESPPEINT

SEQ ID NO: 3004 - protein, 32 aa, Artificial sequence
  Synthetic peptide
TSTPTTEAVESTVATLEDSPEVIESPPEINTV

SEQ ID NO: 3005 - protein, 32 aa, Artificial sequence
  Synthetic peptide
STPTTEAVESTVATLEDSPEVIESPPEINTVQ

SEQ ID NO: 3006 - protein, 32 aa, Artificial sequence
  Synthetic peptide
TPTTEAVESTVATLEDSPEVIESPPEINTVQV

SEQ ID NO: 3007 - protein, 32 aa, Artificial sequence
  Synthetic peptide
PTTEAVESTVATLEDSPEVIESPPEINTVQVT

SEQ ID NO: 3008 - protein, 32 aa, Artificial sequence
  Synthetic peptide
TTEAVESTVATLEDSPEVIESPPEINTVQVTS

SEQ ID NO: 3009 - protein, 32 aa, Artificial sequence
  Synthetic peptide
TEAVESTVATLEDSPEVIESPPEINTVQVTST

SEQ ID NO: 3010 - protein, 32 aa, Artificial sequence
  Synthetic peptide
EAVESTVATLEDSPEVIESPPEINTVQVTSTA

SEQ ID NO: 3011 - protein, 32 aa, Artificial sequence
  Synthetic peptide
AVESTVATLEDSPEVIESPPEINTVQVTSTAV

SEQ ID NO: 3012 - protein, 33 aa, Artificial sequence
  Synthetic peptide
MAIPPKKNQDKTEIPTINTIASGEPTSTPTTEA

SEQ ID NO: 3013 - protein, 33 aa, Artificial sequence
  Synthetic peptide
AIPPKKNQDKTEIPTINTIASGEPTSTPTTEAV

SEQ ID NO: 3014 - protein, 33 aa, Artificial sequence
  Synthetic peptide
IPPKKNQDKTEIPTINTIASGEPTSTPTTEAVE

SEQ ID NO: 3015 - protein, 33 aa, Artificial sequence
  Synthetic peptide
PPKKNQDKTEIPTINTIASGEPTSTPTTEAVES

SEQ ID NO: 3016 - protein, 33 aa, Artificial sequence
  Synthetic peptide
PKKNQDKTEIPTINTIASGEPTSTPTTEAVEST

SEQ ID NO: 3017 - protein, 33 aa, Artificial sequence
  Synthetic peptide
KKNQDKTEIPTINTIASGEPTSTPTTEAVESTV

SEQ ID NO: 3018 - protein, 33 aa, Artificial sequence
  Synthetic peptide
KNQDKTEIPTINTIASGEPTSTPTTEAVESTVA

SEQ ID NO: 3019 - protein, 33 aa, Artificial sequence
  Synthetic peptide
NQDKTEIPTINTIASGEPTSTPTTEAVESTVAT

SEQ ID NO: 3020 - protein, 33 aa, Artificial sequence
  Synthetic peptide
QDKTEIPTINTIASGEPTSTPTTEAVESTVATL

SEQ ID NO: 3021 - protein, 33 aa, Artificial sequence
  Synthetic peptide
DKTEIPTINTIASGEPTSTPTTEAVESTVATLE

SEQ ID NO: 3022 - protein, 33 aa, Artificial sequence
  Synthetic peptide
KTEIPTINTIASGEPTSTPTTEAVESTVATLED

SEQ ID NO: 3023 - protein, 33 aa, Artificial sequence
  Synthetic peptide
TEIPTINTIASGEPTSTPTTEAVESTVATLEDS

SEQ ID NO: 3024 - protein, 33 aa, Artificial sequence
  Synthetic peptide
EIPTINTIASGEPTSTPTTEAVESTVATLEDSP

SEQ ID NO: 3025 - protein, 33 aa, Artificial sequence
  Synthetic peptide
IPTINTIASGEPTSTPTTEAVESTVATLEDSPE

SEQ ID NO: 3026 - protein, 33 aa, Artificial sequence
  Synthetic peptide
PTINTIASGEPTSTPTTEAVESTVATLEDSPEV

SEQ ID NO: 3027 - protein, 33 aa, Artificial sequence
  Synthetic peptide
TINTIASGEPTSTPTTEAVESTVATLEDSPEVI

SEQ ID NO: 3028 - protein, 33 aa, Artificial sequence
  Synthetic peptide
INTIASGEPTSTPTTEAVESTVATLEDSPEVIE

SEQ ID NO: 3029 - protein, 33 aa, Artificial sequence
  Synthetic peptide
NTIASGEPTSTPTTEAVESTVATLEDSPEVIES

SEQ ID NO: 3030 - protein, 33 aa, Artificial sequence
  Synthetic peptide
TIASGEPTSTPTTEAVESTVATLEDSPEVIESP

SEQ ID NO: 3031 - protein, 33 aa, Artificial sequence
  Synthetic peptide
IASGEPTSTPTTEAVESTVATLEDSPEVIESPP

SEQ ID NO: 3032 - protein, 33 aa, Artificial sequence
  Synthetic peptide
ASGEPTSTPTTEAVESTVATLEDSPEVIESPPE

SEQ ID NO: 3033 - protein, 33 aa, Artificial sequence
  Synthetic peptide
SGEPTSTPTTEAVESTVATLEDSPEVIESPPEI

SEQ ID NO: 3034 - protein, 33 aa, Artificial sequence
  Synthetic peptide
GEPTSTPTTEAVESTVATLEDSPEVIESPPEIN

SEQ ID NO: 3035 - protein, 33 aa, Artificial sequence
  Synthetic peptide
EPTSTPTTEAVESTVATLEDSPEVIESPPEINT

SEQ ID NO: 3036 - protein, 33 aa, Artificial sequence
  Synthetic peptide
PTSTPTTEAVESTVATLEDSPEVIESPPEINTV

SEQ ID NO: 3037 - protein, 33 aa, Artificial sequence
  Synthetic peptide
TSTPTTEAVESTVATLEDSPEVIESPPEINTVQ

SEQ ID NO: 3038 - protein, 33 aa, Artificial sequence
  Synthetic peptide
STPTTEAVESTVATLEDSPEVIESPPEINTVQV

SEQ ID NO: 3039 - protein, 33 aa, Artificial sequence
  Synthetic peptide
TPTTEAVESTVATLEDSPEVIESPPEINTVQVT

SEQ ID NO: 3040 - protein, 33 aa, Artificial sequence
  Synthetic peptide
PTTEAVESTVATLEDSPEVIESPPEINTVQVTS

SEQ ID NO: 3041 - protein, 33 aa, Artificial sequence
  Synthetic peptide
TTEAVESTVATLEDSPEVIESPPEINTVQVTST

SEQ ID NO: 3042 - protein, 33 aa, Artificial sequence
  Synthetic peptide
TEAVESTVATLEDSPEVIESPPEINTVQVTSTA

SEQ ID NO: 3043 - protein, 33 aa, Artificial sequence
  Synthetic peptide
EAVESTVATLEDSPEVIESPPEINTVQVTSTAV

SEQ ID NO: 3044 - protein, 34 aa, Artificial sequence
  Synthetic peptide
MAIPPKKNQDKTEIPTINTIASGEPTSTPTTEAV

SEQ ID NO: 3045 - protein, 34 aa, Artificial sequence
  Synthetic peptide
AIPPKKNQDKTEIPTINTIASGEPTSTPTTEAVE

SEQ ID NO: 3046 - protein, 34 aa, Artificial sequence
  Synthetic peptide
IPPKKNQDKTEIPTINTIASGEPTSTPTTEAVES

SEQ ID NO: 3047 - protein, 34 aa, Artificial sequence
  Synthetic peptide
PPKKNQDKTEIPTINTIASGEPTSTPTTEAVEST

SEQ ID NO: 3048 - protein, 34 aa, Artificial sequence
  Synthetic peptide
PKKNQDKTEIPTINTIASGEPTSTPTTEAVESTV

SEQ ID NO: 3049 - protein, 34 aa, Artificial sequence
  Synthetic peptide
KKNQDKTEIPTINTIASGEPTSTPTTEAVESTVA

SEQ ID NO: 3050 - protein, 34 aa, Artificial sequence
  Synthetic peptide
KNQDKTEIPTINTIASGEPTSTPTTEAVESTVAT

SEQ ID NO: 3051 - protein, 34 aa, Artificial sequence
  Synthetic peptide
NQDKTEIPTINTIASGEPTSTPTTEAVESTVATL

SEQ ID NO: 3052 - protein, 34 aa, Artificial sequence
  Synthetic peptide
QDKTEIPTINTIASGEPTSTPTTEAVESTVATLE

SEQ ID NO: 3053 - protein, 34 aa, Artificial sequence
  Synthetic peptide
DKTEIPTINTIASGEPTSTPTTEAVESTVATLED

SEQ ID NO: 3054 - protein, 34 aa, Artificial sequence
  Synthetic peptide
KTEIPTINTIASGEPTSTPTTEAVESTVATLEDS

SEQ ID NO: 3055 - protein, 34 aa, Artificial sequence
  Synthetic peptide
TEIPTINTIASGEPTSTPTTEAVESTVATLEDSP

SEQ ID NO: 3056 - protein, 34 aa, Artificial sequence
  Synthetic peptide
EIPTINTIASGEPTSTPTTEAVESTVATLEDSPE

SEQ ID NO: 3057 - protein, 34 aa, Artificial sequence
  Synthetic peptide
IPTINTIASGEPTSTPTTEAVESTVATLEDSPEV

SEQ ID NO: 3058 - protein, 34 aa, Artificial sequence
  Synthetic peptide
PTINTIASGEPTSTPTTEAVESTVATLEDSPEVI

SEQ ID NO: 3059 - protein, 34 aa, Artificial sequence
  Synthetic peptide
TINTIASGEPTSTPTTEAVESTVATLEDSPEVIE

SEQ ID NO: 3060 - protein, 34 aa, Artificial sequence
  Synthetic peptide
INTIASGEPTSTPTTEAVESTVATLEDSPEVIES

SEQ ID NO: 3061 - protein, 34 aa, Artificial sequence
  Synthetic peptide
NTIASGEPTSTPTTEAVESTVATLEDSPEVIESP

SEQ ID NO: 3062 - protein, 34 aa, Artificial sequence
  Synthetic peptide
TIASGEPTSTPTTEAVESTVATLEDSPEVIESPP

SEQ ID NO: 3063 - protein, 34 aa, Artificial sequence
  Synthetic peptide
IASGEPTSTPTTEAVESTVATLEDSPEVIESPPE

SEQ ID NO: 3064 - protein, 34 aa, Artificial sequence
  Synthetic peptide
ASGEPTSTPTTEAVESTVATLEDSPEVIESPPEI

SEQ ID NO: 3065 - protein, 34 aa, Artificial sequence
  Synthetic peptide
SGEPTSTPTTEAVESTVATLEDSPEVIESPPEIN

SEQ ID NO: 3066 - protein, 34 aa, Artificial sequence
  Synthetic peptide
GEPTSTPTTEAVESTVATLEDSPEVIESPPEINT

SEQ ID NO: 3067 - protein, 34 aa, Artificial sequence
  Synthetic peptide
EPTSTPTTEAVESTVATLEDSPEVIESPPEINTV

SEQ ID NO: 3068 - protein, 34 aa, Artificial sequence
  Synthetic peptide
PTSTPTTEAVESTVATLEDSPEVIESPPEINTVQ

SEQ ID NO: 3069 - protein, 34 aa, Artificial sequence
  Synthetic peptide
TSTPTTEAVESTVATLEDSPEVIESPPEINTVQV

SEQ ID NO: 3070 - protein, 34 aa, Artificial sequence
  Synthetic peptide
STPTTEAVESTVATLEDSPEVIESPPEINTVQVT

SEQ ID NO: 3071 - protein, 34 aa, Artificial sequence
  Synthetic peptide
TPTTEAVESTVATLEDSPEVIESPPEINTVQVTS

SEQ ID NO: 3072 - protein, 34 aa, Artificial sequence
  Synthetic peptide
PTTEAVESTVATLEDSPEVIESPPEINTVQVTST

SEQ ID NO: 3073 - protein, 34 aa, Artificial sequence
  Synthetic peptide
TTEAVESTVATLEDSPEVIESPPEINTVQVTSTA

SEQ ID NO: 3074 - protein, 34 aa, Artificial sequence
  Synthetic peptide
TEAVESTVATLEDSPEVIESPPEINTVQVTSTAV

SEQ ID NO: 3075 - protein, 35 aa, Artificial sequence
  Synthetic peptide
MAIPPKKNQDKTEIPTINTIASGEPTSTPTTEAVE

SEQ ID NO: 3076 - protein, 35 aa, Artificial sequence
  Synthetic peptide
AIPPKKNQDKTEIPTINTIASGEPTSTPTTEAVES

SEQ ID NO: 3077 - protein, 35 aa, Artificial sequence
  Synthetic peptide
IPPKKNQDKTEIPTINTIASGEPTSTPTTEAVEST

SEQ ID NO: 3078 - protein, 35 aa, Artificial sequence
  Synthetic peptide
PPKKNQDKTEIPTINTIASGEPTSTPTTEAVESTV

SEQ ID NO: 3079 - protein, 35 aa, Artificial sequence
  Synthetic peptide
PKKNQDKTEIPTINTIASGEPTSTPTTEAVESTVA

SEQ ID NO: 3080 - protein, 35 aa, Artificial sequence
  Synthetic peptide
KKNQDKTEIPTINTIASGEPTSTPTTEAVESTVAT

SEQ ID NO: 3081 - protein, 35 aa, Artificial sequence
  Synthetic peptide
KNQDKTEIPTINTIASGEPTSTPTTEAVESTVATL

SEQ ID NO: 3082 - protein, 35 aa, Artificial sequence
  Synthetic peptide
NQDKTEIPTINTIASGEPTSTPTTEAVESTVATLE

SEQ ID NO: 3083 - protein, 35 aa, Artificial sequence
  Synthetic peptide
QDKTEIPTINTIASGEPTSTPTTEAVESTVATLED

SEQ ID NO: 3084 - protein, 35 aa, Artificial sequence
  Synthetic peptide
DKTEIPTINTIASGEPTSTPTTEAVESTVATLEDS

SEQ ID NO: 3085 - protein, 35 aa, Artificial sequence
  Synthetic peptide
KTEIPTINTIASGEPTSTPTTEAVESTVATLEDSP

SEQ ID NO: 3086 - protein, 35 aa, Artificial sequence
  Synthetic peptide
TEIPTINTIASGEPTSTPTTEAVESTVATLEDSPE

SEQ ID NO: 3087 - protein, 35 aa, Artificial sequence
  Synthetic peptide
EIPTINTIASGEPTSTPTTEAVESTVATLEDSPEV

SEQ ID NO: 3088 - protein, 35 aa, Artificial sequence
  Synthetic peptide
IPTINTIASGEPTSTPTTEAVESTVATLEDSPEVI

SEQ ID NO: 3089 - protein, 35 aa, Artificial sequence
  Synthetic peptide
PTINTIASGEPTSTPTTEAVESTVATLEDSPEVIE

SEQ ID NO: 3090 - protein, 35 aa, Artificial sequence
  Synthetic peptide
TINTIASGEPTSTPTTEAVESTVATLEDSPEVIES

SEQ ID NO: 3091 - protein, 35 aa, Artificial sequence
  Synthetic peptide
INTIASGEPTSTPTTEAVESTVATLEDSPEVIESP

SEQ ID NO: 3092 - protein, 35 aa, Artificial sequence
  Synthetic peptide
NTIASGEPTSTPTTEAVESTVATLEDSPEVIESPP

SEQ ID NO: 3093 - protein, 35 aa, Artificial sequence
  Synthetic peptide
TIASGEPTSTPTTEAVESTVATLEDSPEVIESPPE

SEQ ID NO: 3094 - protein, 35 aa, Artificial sequence
  Synthetic peptide
IASGEPTSTPTTEAVESTVATLEDSPEVIESPPEI

SEQ ID NO: 3095 - protein, 35 aa, Artificial sequence
  Synthetic peptide
ASGEPTSTPTTEAVESTVATLEDSPEVIESPPEIN

SEQ ID NO: 3096 - protein, 35 aa, Artificial sequence
  Synthetic peptide
SGEPTSTPTTEAVESTVATLEDSPEVIESPPEINT

SEQ ID NO: 3097 - protein, 35 aa, Artificial sequence
  Synthetic peptide
GEPTSTPTTEAVESTVATLEDSPEVIESPPEINTV

SEQ ID NO: 3098 - protein, 35 aa, Artificial sequence
  Synthetic peptide
EPTSTPTTEAVESTVATLEDSPEVIESPPEINTVQ

SEQ ID NO: 3099 - protein, 35 aa, Artificial sequence
  Synthetic peptide
PTSTPTTEAVESTVATLEDSPEVIESPPEINTVQV

SEQ ID NO: 3100 - protein, 35 aa, Artificial sequence
  Synthetic peptide
TSTPTTEAVESTVATLEDSPEVIESPPEINTVQVT

SEQ ID NO: 3101 - protein, 35 aa, Artificial sequence
  Synthetic peptide
STPTTEAVESTVATLEDSPEVIESPPEINTVQVTS

SEQ ID NO: 3102 - protein, 35 aa, Artificial sequence
  Synthetic peptide
TPTTEAVESTVATLEDSPEVIESPPEINTVQVTST

SEQ ID NO: 3103 - protein, 35 aa, Artificial sequence
  Synthetic peptide
PTTEAVESTVATLEDSPEVIESPPEINTVQVTSTA

SEQ ID NO: 3104 - protein, 35 aa, Artificial sequence
  Synthetic peptide
TTEAVESTVATLEDSPEVIESPPEINTVQVTSTAV

SEQ ID NO: 3105 - protein, 36 aa, Artificial sequence
  Synthetic peptide
MAIPPKKNQDKTEIPTINTIASGEPTSTPTTEAVES

SEQ ID NO: 3106 - protein, 36 aa, Artificial sequence
  Synthetic peptide
AIPPKKNQDKTEIPTINTIASGEPTSTPTTEAVEST

SEQ ID NO: 3107 - protein, 36 aa, Artificial sequence
  Synthetic peptide
IPPKKNQDKTEIPTINTIASGEPTSTPTTEAVESTV

SEQ ID NO: 3108 - protein, 36 aa, Artificial sequence
  Synthetic peptide
PPKKNQDKTEIPTINTIASGEPTSTPTTEAVESTVA

SEQ ID NO: 3109 - protein, 36 aa, Artificial sequence
  Synthetic peptide
PKKNQDKTEIPTINTIASGEPTSTPTTEAVESTVAT

SEQ ID NO: 3110 - protein, 36 aa, Artificial sequence
  Synthetic peptide
KKNQDKTEIPTINTIASGEPTSTPTTEAVESTVATL

SEQ ID NO: 3111 - protein, 36 aa, Artificial sequence
  Synthetic peptide
KNQDKTEIPTINTIASGEPTSTPTTEAVESTVATLE

SEQ ID NO: 3112 - protein, 36 aa, Artificial sequence
  Synthetic peptide
NQDKTEIPTINTIASGEPTSTPTTEAVESTVATLED

SEQ ID NO: 3113 - protein, 36 aa, Artificial sequence
  Synthetic peptide
QDKTEIPTINTIASGEPTSTPTTEAVESTVATLEDS

SEQ ID NO: 3114 - protein, 36 aa, Artificial sequence
  Synthetic peptide
DKTEIPTINTIASGEPTSTPTTEAVESTVATLEDSP

SEQ ID NO: 3115 - protein, 36 aa, Artificial sequence
  Synthetic peptide
KTEIPTINTIASGEPTSTPTTEAVESTVATLEDSPE

SEQ ID NO: 3116 - protein, 36 aa, Artificial sequence
  Synthetic peptide
TEIPTINTIASGEPTSTPTTEAVESTVATLEDSPEV

SEQ ID NO: 3117 - protein, 36 aa, Artificial sequence
  Synthetic peptide
EIPTINTIASGEPTSTPTTEAVESTVATLEDSPEVI

SEQ ID NO: 3118 - protein, 36 aa, Artificial sequence
  Synthetic peptide
IPTINTIASGEPTSTPTTEAVESTVATLEDSPEVIE

SEQ ID NO: 3119 - protein, 36 aa, Artificial sequence
  Synthetic peptide
PTINTIASGEPTSTPTTEAVESTVATLEDSPEVIES

SEQ ID NO: 3120 - protein, 36 aa, Artificial sequence
  Synthetic peptide
TINTIASGEPTSTPTTEAVESTVATLEDSPEVIESP

SEQ ID NO: 3121 - protein, 36 aa, Artificial sequence
  Synthetic peptide
INTIASGEPTSTPTTEAVESTVATLEDSPEVIESPP

SEQ ID NO: 3122 - protein, 36 aa, Artificial sequence
  Synthetic peptide
NTIASGEPTSTPTTEAVESTVATLEDSPEVIESPPE

SEQ ID NO: 3123 - protein, 36 aa, Artificial sequence
  Synthetic peptide
TIASGEPTSTPTTEAVESTVATLEDSPEVIESPPEI

SEQ ID NO: 3124 - protein, 36 aa, Artificial sequence
  Synthetic peptide
IASGEPTSTPTTEAVESTVATLEDSPEVIESPPEIN

SEQ ID NO: 3125 - protein, 36 aa, Artificial sequence
  Synthetic peptide
ASGEPTSTPTTEAVESTVATLEDSPEVIESPPEINT

SEQ ID NO: 3126 - protein, 36 aa, Artificial sequence
  Synthetic peptide
SGEPTSTPTTEAVESTVATLEDSPEVIESPPEINTV

SEQ ID NO: 3127 - protein, 36 aa, Artificial sequence
  Synthetic peptide
GEPTSTPTTEAVESTVATLEDSPEVIESPPEINTVQ

SEQ ID NO: 3128 - protein, 36 aa, Artificial sequence
  Synthetic peptide
EPTSTPTTEAVESTVATLEDSPEVIESPPEINTVQV

SEQ ID NO: 3129 - protein, 36 aa, Artificial sequence
  Synthetic peptide
PTSTPTTEAVESTVATLEDSPEVIESPPEINTVQVT

SEQ ID NO: 3130 - protein, 36 aa, Artificial sequence
  Synthetic peptide
TSTPTTEAVESTVATLEDSPEVIESPPEINTVQVTS

SEQ ID NO: 3131 - protein, 36 aa, Artificial sequence
  Synthetic peptide
STPTTEAVESTVATLEDSPEVIESPPEINTVQVTST

SEQ ID NO: 3132 - protein, 36 aa, Artificial sequence
  Synthetic peptide
TPTTEAVESTVATLEDSPEVIESPPEINTVQVTSTA

SEQ ID NO: 3133 - protein, 36 aa, Artificial sequence
  Synthetic peptide
PTTEAVESTVATLEDSPEVIESPPEINTVQVTSTAV

SEQ ID NO: 3134 - protein, 37 aa, Artificial sequence
  Synthetic peptide
MAIPPKKNQDKTEIPTINTIASGEPTSTPTTEAVEST

SEQ ID NO: 3135 - protein, 37 aa, Artificial sequence
  Synthetic peptide
AIPPKKNQDKTEIPTINTIASGEPTSTPTTEAVESTV

SEQ ID NO: 3136 - protein, 37 aa, Artificial sequence
  Synthetic peptide
IPPKKNQDKTEIPTINTIASGEPTSTPTTEAVESTVA

SEQ ID NO: 3137 - protein, 37 aa, Artificial sequence
  Synthetic peptide
PPKKNQDKTEIPTINTIASGEPTSTPTTEAVESTVAT

SEQ ID NO: 3138 - protein, 37 aa, Artificial sequence
  Synthetic peptide
PKKNQDKTEIPTINTIASGEPTSTPTTEAVESTVATL

SEQ ID NO: 3139 - protein, 37 aa, Artificial sequence
  Synthetic peptide
KKNQDKTEIPTINTIASGEPTSTPTTEAVESTVATLE

SEQ ID NO: 3140 - protein, 37 aa, Artificial sequence
  Synthetic peptide
KNQDKTEIPTINTIASGEPTSTPTTEAVESTVATLED

SEQ ID NO: 3141 - protein, 37 aa, Artificial sequence
  Synthetic peptide
NQDKTEIPTINTIASGEPTSTPTTEAVESTVATLEDS

SEQ ID NO: 3142 - protein, 37 aa, Artificial sequence
  Synthetic peptide
QDKTEIPTINTIASGEPTSTPTTEAVESTVATLEDSP

SEQ ID NO: 3143 - protein, 37 aa, Artificial sequence
  Synthetic peptide
DKTEIPTINTIASGEPTSTPTTEAVESTVATLEDSPE

SEQ ID NO: 3144 - protein, 37 aa, Artificial sequence
  Synthetic peptide
KTEIPTINTIASGEPTSTPTTEAVESTVATLEDSPEV

SEQ ID NO: 3145 - protein, 37 aa, Artificial sequence
  Synthetic peptide
TEIPTINTIASGEPTSTPTTEAVESTVATLEDSPEVI

SEQ ID NO: 3146 - protein, 37 aa, Artificial sequence
  Synthetic peptide
EIPTINTIASGEPTSTPTTEAVESTVATLEDSPEVIE

SEQ ID NO: 3147 - protein, 37 aa, Artificial sequence
  Synthetic peptide
IPTINTIASGEPTSTPTTEAVESTVATLEDSPEVIES

SEQ ID NO: 3148 - protein, 37 aa, Artificial sequence
  Synthetic peptide
PTINTIASGEPTSTPTTEAVESTVATLEDSPEVIESP

SEQ ID NO: 3149 - protein, 37 aa, Artificial sequence
  Synthetic peptide
TINTIASGEPTSTPTTEAVESTVATLEDSPEVIESPP

SEQ ID NO: 3150 - protein, 37 aa, Artificial sequence
  Synthetic peptide
INTIASGEPTSTPTTEAVESTVATLEDSPEVIESPPE

SEQ ID NO: 3151 - protein, 37 aa, Artificial sequence
  Synthetic peptide
NTIASGEPTSTPTTEAVESTVATLEDSPEVIESPPEI

SEQ ID NO: 3152 - protein, 37 aa, Artificial sequence
  Synthetic peptide
TIASGEPTSTPTTEAVESTVATLEDSPEVIESPPEIN

SEQ ID NO: 3153 - protein, 37 aa, Artificial sequence
  Synthetic peptide
IASGEPTSTPTTEAVESTVATLEDSPEVIESPPEINT

SEQ ID NO: 3154 - protein, 37 aa, Artificial sequence
  Synthetic peptide
ASGEPTSTPTTEAVESTVATLEDSPEVIESPPEINTV

SEQ ID NO: 3155 - protein, 37 aa, Artificial sequence
  Synthetic peptide
SGEPTSTPTTEAVESTVATLEDSPEVIESPPEINTVQ

SEQ ID NO: 3156 - protein, 37 aa, Artificial sequence
  Synthetic peptide
GEPTSTPTTEAVESTVATLEDSPEVIESPPEINTVQV

SEQ ID NO: 3157 - protein, 37 aa, Artificial sequence
  Synthetic peptide
EPTSTPTTEAVESTVATLEDSPEVIESPPEINTVQVT

SEQ ID NO: 3158 - protein, 37 aa, Artificial sequence
  Synthetic peptide
PTSTPTTEAVESTVATLEDSPEVIESPPEINTVQVTS

SEQ ID NO: 3159 - protein, 37 aa, Artificial sequence
  Synthetic peptide
TSTPTTEAVESTVATLEDSPEVIESPPEINTVQVTST

SEQ ID NO: 3160 - protein, 37 aa, Artificial sequence
  Synthetic peptide
STPTTEAVESTVATLEDSPEVIESPPEINTVQVTSTA

SEQ ID NO: 3161 - protein, 37 aa, Artificial sequence
  Synthetic peptide
TPTTEAVESTVATLEDSPEVIESPPEINTVQVTSTAV

SEQ ID NO: 3162 - protein, 38 aa, Artificial sequence
  Synthetic peptide
MAIPPKKNQDKTEIPTINTIASGEPTSTPTTEAVESTV

SEQ ID NO: 3163 - protein, 38 aa, Artificial sequence
  Synthetic peptide
AIPPKKNQDKTEIPTINTIASGEPTSTPTTEAVESTVA

SEQ ID NO: 3164 - protein, 38 aa, Artificial sequence
  Synthetic peptide
IPPKKNQDKTEIPTINTIASGEPTSTPTTEAVESTVAT

SEQ ID NO: 3165 - protein, 38 aa, Artificial sequence
  Synthetic peptide
PPKKNQDKTEIPTINTIASGEPTSTPTTEAVESTVATL

SEQ ID NO: 3166 - protein, 38 aa, Artificial sequence
  Synthetic peptide
PKKNQDKTEIPTINTIASGEPTSTPTTEAVESTVATLE

SEQ ID NO: 3167 - protein, 38 aa, Artificial sequence
  Synthetic peptide
KKNQDKTEIPTINTIASGEPTSTPTTEAVESTVATLED

SEQ ID NO: 3168 - protein, 38 aa, Artificial sequence
  Synthetic peptide
KNQDKTEIPTINTIASGEPTSTPTTEAVESTVATLEDS

SEQ ID NO: 3169 - protein, 38 aa, Artificial sequence
  Synthetic peptide
NQDKTEIPTINTIASGEPTSTPTTEAVESTVATLEDSP

SEQ ID NO: 3170 - protein, 38 aa, Artificial sequence
  Synthetic peptide
QDKTEIPTINTIASGEPTSTPTTEAVESTVATLEDSPE

SEQ ID NO: 3171 - protein, 38 aa, Artificial sequence
  Synthetic peptide
DKTEIPTINTIASGEPTSTPTTEAVESTVATLEDSPEV

SEQ ID NO: 3172 - protein, 38 aa, Artificial sequence
  Synthetic peptide
KTEIPTINTIASGEPTSTPTTEAVESTVATLEDSPEVI

SEQ ID NO: 3173 - protein, 38 aa, Artificial sequence
  Synthetic peptide
TEIPTINTIASGEPTSTPTTEAVESTVATLEDSPEVIE

SEQ ID NO: 3174 - protein, 38 aa, Artificial sequence
  Synthetic peptide
EIPTINTIASGEPTSTPTTEAVESTVATLEDSPEVIES

SEQ ID NO: 3175 - protein, 38 aa, Artificial sequence
  Synthetic peptide
IPTINTIASGEPTSTPTTEAVESTVATLEDSPEVIESP

SEQ ID NO: 3176 - protein, 38 aa, Artificial sequence
  Synthetic peptide
PTINTIASGEPTSTPTTEAVESTVATLEDSPEVIESPP

SEQ ID NO: 3177 - protein, 38 aa, Artificial sequence
  Synthetic peptide
TINTIASGEPTSTPTTEAVESTVATLEDSPEVIESPPE

SEQ ID NO: 3178 - protein, 38 aa, Artificial sequence
  Synthetic peptide
INTIASGEPTSTPTTEAVESTVATLEDSPEVIESPPEI

SEQ ID NO: 3179 - protein, 38 aa, Artificial sequence
  Synthetic peptide
NTIASGEPTSTPTTEAVESTVATLEDSPEVIESPPEIN

SEQ ID NO: 3180 - protein, 38 aa, Artificial sequence
  Synthetic peptide
TIASGEPTSTPTTEAVESTVATLEDSPEVIESPPEINT

SEQ ID NO: 3181 - protein, 38 aa, Artificial sequence
  Synthetic peptide
IASGEPTSTPTTEAVESTVATLEDSPEVIESPPEINTV

SEQ ID NO: 3182 - protein, 38 aa, Artificial sequence
  Synthetic peptide
ASGEPTSTPTTEAVESTVATLEDSPEVIESPPEINTVQ

SEQ ID NO: 3183 - protein, 38 aa, Artificial sequence
  Synthetic peptide
SGEPTSTPTTEAVESTVATLEDSPEVIESPPEINTVQV

SEQ ID NO: 3184 - protein, 38 aa, Artificial sequence
  Synthetic peptide
GEPTSTPTTEAVESTVATLEDSPEVIESPPEINTVQVT

SEQ ID NO: 3185 - protein, 38 aa, Artificial sequence
  Synthetic peptide
EPTSTPTTEAVESTVATLEDSPEVIESPPEINTVQVTS

SEQ ID NO: 3186 - protein, 38 aa, Artificial sequence
  Synthetic peptide
PTSTPTTEAVESTVATLEDSPEVIESPPEINTVQVTST

SEQ ID NO: 3187 - protein, 38 aa, Artificial sequence
  Synthetic peptide
TSTPTTEAVESTVATLEDSPEVIESPPEINTVQVTSTA

SEQ ID NO: 3188 - protein, 38 aa, Artificial sequence
  Synthetic peptide
STPTTEAVESTVATLEDSPEVIESPPEINTVQVTSTAV

SEQ ID NO: 3189 - protein, 39 aa, Artificial sequence
  Synthetic peptide
MAIPPKKNQDKTEIPTINTIASGEPTSTPTTEAVESTVA

SEQ ID NO: 3190 - protein, 39 aa, Artificial sequence
  Synthetic peptide
AIPPKKNQDKTEIPTINTIASGEPTSTPTTEAVESTVAT

SEQ ID NO: 3191 - protein, 39 aa, Artificial sequence
  Synthetic peptide
IPPKKNQDKTEIPTINTIASGEPTSTPTTEAVESTVATL

SEQ ID NO: 3192 - protein, 39 aa, Artificial sequence
  Synthetic peptide
PPKKNQDKTEIPTINTIASGEPTSTPTTEAVESTVATLE

SEQ ID NO: 3193 - protein, 39 aa, Artificial sequence
  Synthetic peptide
PKKNQDKTEIPTINTIASGEPTSTPTTEAVESTVATLED

SEQ ID NO: 3194 - protein, 39 aa, Artificial sequence
  Synthetic peptide
KKNQDKTEIPTINTIASGEPTSTPTTEAVESTVATLEDS

SEQ ID NO: 3195 - protein, 39 aa, Artificial sequence
  Synthetic peptide
KNQDKTEIPTINTIASGEPTSTPTTEAVESTVATLEDSP

SEQ ID NO: 3196 - protein, 39 aa, Artificial sequence
  Synthetic peptide
NQDKTEIPTINTIASGEPTSTPTTEAVESTVATLEDSPE

SEQ ID NO: 3197 - protein, 39 aa, Artificial sequence
  Synthetic peptide
QDKTEIPTINTIASGEPTSTPTTEAVESTVATLEDSPEV

SEQ ID NO: 3198 - protein, 39 aa, Artificial sequence
  Synthetic peptide
DKTEIPTINTIASGEPTSTPTTEAVESTVATLEDSPEVI

SEQ ID NO: 3199 - protein, 39 aa, Artificial sequence
  Synthetic peptide
KTEIPTINTIASGEPTSTPTTEAVESTVATLEDSPEVIE

SEQ ID NO: 3200 - protein, 39 aa, Artificial sequence
  Synthetic peptide
TEIPTINTIASGEPTSTPTTEAVESTVATLEDSPEVIES

SEQ ID NO: 3201 - protein, 39 aa, Artificial sequence
  Synthetic peptide
EIPTINTIASGEPTSTPTTEAVESTVATLEDSPEVIESP

SEQ ID NO: 3202 - protein, 39 aa, Artificial sequence
  Synthetic peptide
IPTINTIASGEPTSTPTTEAVESTVATLEDSPEVIESPP

SEQ ID NO: 3203 - protein, 39 aa, Artificial sequence
  Synthetic peptide
PTINTIASGEPTSTPTTEAVESTVATLEDSPEVIESPPE

SEQ ID NO: 3204 - protein, 39 aa, Artificial sequence
  Synthetic peptide
TINTIASGEPTSTPTTEAVESTVATLEDSPEVIESPPEI

SEQ ID NO: 3205 - protein, 39 aa, Artificial sequence
  Synthetic peptide
INTIASGEPTSTPTTEAVESTVATLEDSPEVIESPPEIN

SEQ ID NO: 3206 - protein, 39 aa, Artificial sequence
  Synthetic peptide
NTIASGEPTSTPTTEAVESTVATLEDSPEVIESPPEINT

SEQ ID NO: 3207 - protein, 39 aa, Artificial sequence
  Synthetic peptide
TIASGEPTSTPTTEAVESTVATLEDSPEVIESPPEINTV

SEQ ID NO: 3208 - protein, 39 aa, Artificial sequence
  Synthetic peptide
IASGEPTSTPTTEAVESTVATLEDSPEVIESPPEINTVQ

SEQ ID NO: 3209 - protein, 39 aa, Artificial sequence
  Synthetic peptide
ASGEPTSTPTTEAVESTVATLEDSPEVIESPPEINTVQV

SEQ ID NO: 3210 - protein, 39 aa, Artificial sequence
  Synthetic peptide
SGEPTSTPTTEAVESTVATLEDSPEVIESPPEINTVQVT

SEQ ID NO: 3211 - protein, 39 aa, Artificial sequence
  Synthetic peptide
GEPTSTPTTEAVESTVATLEDSPEVIESPPEINTVQVTS

SEQ ID NO: 3212 - protein, 39 aa, Artificial sequence
  Synthetic peptide
EPTSTPTTEAVESTVATLEDSPEVIESPPEINTVQVTST

SEQ ID NO: 3213 - protein, 39 aa, Artificial sequence
  Synthetic peptide
PTSTPTTEAVESTVATLEDSPEVIESPPEINTVQVTSTA

SEQ ID NO: 3214 - protein, 39 aa, Artificial sequence
  Synthetic peptide
TSTPTTEAVESTVATLEDSPEVIESPPEINTVQVTSTAV

SEQ ID NO: 3215 - protein, 40 aa, Artificial sequence
  Synthetic peptide
MAIPPKKNQDKTEIPTINTIASGEPTSTPTTEAVESTVAT

SEQ ID NO: 3216 - protein, 40 aa, Artificial sequence
  Synthetic peptide
AIPPKKNQDKTEIPTINTIASGEPTSTPTTEAVESTVATL

SEQ ID NO: 3217 - protein, 40 aa, Artificial sequence
  Synthetic peptide
IPPKKNQDKTEIPTINTIASGEPTSTPTTEAVESTVATLE

SEQ ID NO: 3218 - protein, 40 aa, Artificial sequence
  Synthetic peptide
PPKKNQDKTEIPTINTIASGEPTSTPTTEAVESTVATLED

SEQ ID NO: 3219 - protein, 40 aa, Artificial sequence
  Synthetic peptide
PKKNQDKTEIPTINTIASGEPTSTPTTEAVESTVATLEDS

SEQ ID NO: 3220 - protein, 40 aa, Artificial sequence
  Synthetic peptide
KKNQDKTEIPTINTIASGEPTSTPTTEAVESTVATLEDSP

SEQ ID NO: 3221 - protein, 40 aa, Artificial sequence
  Synthetic peptide
KNQDKTEIPTINTIASGEPTSTPTTEAVESTVATLEDSPE

SEQ ID NO: 3222 - protein, 40 aa, Artificial sequence
  Synthetic peptide
NQDKTEIPTINTIASGEPTSTPTTEAVESTVATLEDSPEV

SEQ ID NO: 3223 - protein, 40 aa, Artificial sequence
  Synthetic peptide
QDKTEIPTINTIASGEPTSTPTTEAVESTVATLEDSPEVI

SEQ ID NO: 3224 - protein, 40 aa, Artificial sequence
  Synthetic peptide
DKTEIPTINTIASGEPTSTPTTEAVESTVATLEDSPEVIE

SEQ ID NO: 3225 - protein, 40 aa, Artificial sequence
  Synthetic peptide
KTEIPTINTIASGEPTSTPTTEAVESTVATLEDSPEVIES

SEQ ID NO: 3226 - protein, 40 aa, Artificial sequence
  Synthetic peptide
TEIPTINTIASGEPTSTPTTEAVESTVATLEDSPEVIESP

SEQ ID NO: 3227 - protein, 40 aa, Artificial sequence
  Synthetic peptide
EIPTINTIASGEPTSTPTTEAVESTVATLEDSPEVIESPP

SEQ ID NO: 3228 - protein, 40 aa, Artificial sequence
  Synthetic peptide
IPTINTIASGEPTSTPTTEAVESTVATLEDSPEVIESPPE

SEQ ID NO: 3229 - protein, 40 aa, Artificial sequence
  Synthetic peptide
PTINTIASGEPTSTPTTEAVESTVATLEDSPEVIESPPEI

SEQ ID NO: 3230 - protein, 40 aa, Artificial sequence
  Synthetic peptide
TINTIASGEPTSTPTTEAVESTVATLEDSPEVIESPPEIN

SEQ ID NO: 3231 - protein, 40 aa, Artificial sequence
  Synthetic peptide
INTIASGEPTSTPTTEAVESTVATLEDSPEVIESPPEINT

SEQ ID NO: 3232 - protein, 40 aa, Artificial sequence
  Synthetic peptide
NTIASGEPTSTPTTEAVESTVATLEDSPEVIESPPEINTV

SEQ ID NO: 3233 - protein, 40 aa, Artificial sequence
  Synthetic peptide
TIASGEPTSTPTTEAVESTVATLEDSPEVIESPPEINTVQ

SEQ ID NO: 3234 - protein, 40 aa, Artificial sequence
  Synthetic peptide
IASGEPTSTPTTEAVESTVATLEDSPEVIESPPEINTVQV

SEQ ID NO: 3235 - protein, 40 aa, Artificial sequence
  Synthetic peptide
ASGEPTSTPTTEAVESTVATLEDSPEVIESPPEINTVQVT

SEQ ID NO: 3236 - protein, 40 aa, Artificial sequence
  Synthetic peptide
SGEPTSTPTTEAVESTVATLEDSPEVIESPPEINTVQVTS

SEQ ID NO: 3237 - protein, 40 aa, Artificial sequence
  Synthetic peptide
GEPTSTPTTEAVESTVATLEDSPEVIESPPEINTVQVTST

SEQ ID NO: 3238 - protein, 40 aa, Artificial sequence
  Synthetic peptide
EPTSTPTTEAVESTVATLEDSPEVIESPPEINTVQVTSTA

SEQ ID NO: 3239 - protein, 40 aa, Artificial sequence
  Synthetic peptide
PTSTPTTEAVESTVATLEDSPEVIESPPEINTVQVTSTAV

SEQ ID NO: 3240 - protein, 41 aa, Artificial sequence
  Synthetic peptide
MAIPPKKNQDKTEIPTINTIASGEPTSTPTTEAVESTVATL

SEQ ID NO: 3241 - protein, 41 aa, Artificial sequence
  Synthetic peptide
AIPPKKNQDKTEIPTINTIASGEPTSTPTTEAVESTVATLE

SEQ ID NO: 3242 - protein, 41 aa, Artificial sequence
  Synthetic peptide
IPPKKNQDKTEIPTINTIASGEPTSTPTTEAVESTVATLED

SEQ ID NO: 3243 - protein, 41 aa, Artificial sequence
  Synthetic peptide
PPKKNQDKTEIPTINTIASGEPTSTPTTEAVESTVATLEDS

SEQ ID NO: 3244 - protein, 41 aa, Artificial sequence
  Synthetic peptide
PKKNQDKTEIPTINTIASGEPTSTPTTEAVESTVATLEDSP

SEQ ID NO: 3245 - protein, 41 aa, Artificial sequence
  Synthetic peptide
KKNQDKTEIPTINTIASGEPTSTPTTEAVESTVATLEDSPE

SEQ ID NO: 3246 - protein, 41 aa, Artificial sequence
  Synthetic peptide
KNQDKTEIPTINTIASGEPTSTPTTEAVESTVATLEDSPEV

SEQ ID NO: 3247 - protein, 41 aa, Artificial sequence
  Synthetic peptide
NQDKTEIPTINTIASGEPTSTPTTEAVESTVATLEDSPEVI

SEQ ID NO: 3248 - protein, 41 aa, Artificial sequence
  Synthetic peptide
QDKTEIPTINTIASGEPTSTPTTEAVESTVATLEDSPEVIE

SEQ ID NO: 3249 - protein, 41 aa, Artificial sequence
  Synthetic peptide
DKTEIPTINTIASGEPTSTPTTEAVESTVATLEDSPEVIES

SEQ ID NO: 3250 - protein, 41 aa, Artificial sequence
  Synthetic peptide
KTEIPTINTIASGEPTSTPTTEAVESTVATLEDSPEVIESP

SEQ ID NO: 3251 - protein, 41 aa, Artificial sequence
  Synthetic peptide
TEIPTINTIASGEPTSTPTTEAVESTVATLEDSPEVIESPP

SEQ ID NO: 3252 - protein, 41 aa, Artificial sequence
  Synthetic peptide
EIPTINTIASGEPTSTPTTEAVESTVATLEDSPEVIESPPE

SEQ ID NO: 3253 - protein, 41 aa, Artificial sequence
  Synthetic peptide
IPTINTIASGEPTSTPTTEAVESTVATLEDSPEVIESPPEI

SEQ ID NO: 3254 - protein, 41 aa, Artificial sequence
  Synthetic peptide
PTINTIASGEPTSTPTTEAVESTVATLEDSPEVIESPPEIN

SEQ ID NO: 3255 - protein, 41 aa, Artificial sequence
  Synthetic peptide
TINTIASGEPTSTPTTEAVESTVATLEDSPEVIESPPEINT

SEQ ID NO: 3256 - protein, 41 aa, Artificial sequence
  Synthetic peptide
INTIASGEPTSTPTTEAVESTVATLEDSPEVIESPPEINTV

SEQ ID NO: 3257 - protein, 41 aa, Artificial sequence
  Synthetic peptide
NTIASGEPTSTPTTEAVESTVATLEDSPEVIESPPEINTVQ

SEQ ID NO: 3258 - protein, 41 aa, Artificial sequence
  Synthetic peptide
TIASGEPTSTPTTEAVESTVATLEDSPEVIESPPEINTVQV

SEQ ID NO: 3259 - protein, 41 aa, Artificial sequence
  Synthetic peptide
IASGEPTSTPTTEAVESTVATLEDSPEVIESPPEINTVQVT

SEQ ID NO: 3260 - protein, 41 aa, Artificial sequence
  Synthetic peptide
ASGEPTSTPTTEAVESTVATLEDSPEVIESPPEINTVQVTS

SEQ ID NO: 3261 - protein, 41 aa, Artificial sequence
  Synthetic peptide
SGEPTSTPTTEAVESTVATLEDSPEVIESPPEINTVQVTST

SEQ ID NO: 3262 - protein, 41 aa, Artificial sequence
  Synthetic peptide
GEPTSTPTTEAVESTVATLEDSPEVIESPPEINTVQVTSTA

SEQ ID NO: 3263 - protein, 41 aa, Artificial sequence
  Synthetic peptide
EPTSTPTTEAVESTVATLEDSPEVIESPPEINTVQVTSTAV

SEQ ID NO: 3264 - protein, 42 aa, Artificial sequence
  Synthetic peptide
MAIPPKKNQDKTEIPTINTIASGEPTSTPTTEAVESTVATLE

SEQ ID NO: 3265 - protein, 42 aa, Artificial sequence
  Synthetic peptide
AIPPKKNQDKTEIPTINTIASGEPTSTPTTEAVESTVATLED

SEQ ID NO: 3266 - protein, 42 aa, Artificial sequence
  Synthetic peptide
IPPKKNQDKTEIPTINTIASGEPTSTPTTEAVESTVATLEDS

SEQ ID NO: 3267 - protein, 42 aa, Artificial sequence
  Synthetic peptide
PPKKNQDKTEIPTINTIASGEPTSTPTTEAVESTVATLEDSP

SEQ ID NO: 3268 - protein, 42 aa, Artificial sequence
  Synthetic peptide
PKKNQDKTEIPTINTIASGEPTSTPTTEAVESTVATLEDSPE

SEQ ID NO: 3269 - protein, 42 aa, Artificial sequence
  Synthetic peptide
KKNQDKTEIPTINTIASGEPTSTPTTEAVESTVATLEDSPEV

SEQ ID NO: 3270 - protein, 42 aa, Artificial sequence
  Synthetic peptide
KNQDKTEIPTINTIASGEPTSTPTTEAVESTVATLEDSPEVI

SEQ ID NO: 3271 - protein, 42 aa, Artificial sequence
  Synthetic peptide
NQDKTEIPTINTIASGEPTSTPTTEAVESTVATLEDSPEVIE

SEQ ID NO: 3272 - protein, 42 aa, Artificial sequence
  Synthetic peptide
QDKTEIPTINTIASGEPTSTPTTEAVESTVATLEDSPEVIES

SEQ ID NO: 3273 - protein, 42 aa, Artificial sequence
  Synthetic peptide
DKTEIPTINTIASGEPTSTPTTEAVESTVATLEDSPEVIESP

SEQ ID NO: 3274 - protein, 42 aa, Artificial sequence
  Synthetic peptide
KTEIPTINTIASGEPTSTPTTEAVESTVATLEDSPEVIESPP

SEQ ID NO: 3275 - protein, 42 aa, Artificial sequence
  Synthetic peptide
TEIPTINTIASGEPTSTPTTEAVESTVATLEDSPEVIESPPE

SEQ ID NO: 3276 - protein, 42 aa, Artificial sequence
  Synthetic peptide
EIPTINTIASGEPTSTPTTEAVESTVATLEDSPEVIESPPEI

SEQ ID NO: 3277 - protein, 42 aa, Artificial sequence
  Synthetic peptide
IPTINTIASGEPTSTPTTEAVESTVATLEDSPEVIESPPEIN

SEQ ID NO: 3278 - protein, 42 aa, Artificial sequence
  Synthetic peptide
PTINTIASGEPTSTPTTEAVESTVATLEDSPEVIESPPEINT

SEQ ID NO: 3279 - protein, 42 aa, Artificial sequence
  Synthetic peptide
TINTIASGEPTSTPTTEAVESTVATLEDSPEVIESPPEINTV

SEQ ID NO: 3280 - protein, 42 aa, Artificial sequence
  Synthetic peptide
INTIASGEPTSTPTTEAVESTVATLEDSPEVIESPPEINTVQ

SEQ ID NO: 3281 - protein, 42 aa, Artificial sequence
  Synthetic peptide
NTIASGEPTSTPTTEAVESTVATLEDSPEVIESPPEINTVQV

SEQ ID NO: 3282 - protein, 42 aa, Artificial sequence
  Synthetic peptide
TIASGEPTSTPTTEAVESTVATLEDSPEVIESPPEINTVQVT

SEQ ID NO: 3283 - protein, 42 aa, Artificial sequence
  Synthetic peptide
IASGEPTSTPTTEAVESTVATLEDSPEVIESPPEINTVQVTS

SEQ ID NO: 3284 - protein, 42 aa, Artificial sequence
  Synthetic peptide
ASGEPTSTPTTEAVESTVATLEDSPEVIESPPEINTVQVTST

SEQ ID NO: 3285 - protein, 42 aa, Artificial sequence
  Synthetic peptide
SGEPTSTPTTEAVESTVATLEDSPEVIESPPEINTVQVTSTA

SEQ ID NO: 3286 - protein, 42 aa, Artificial sequence
  Synthetic peptide
GEPTSTPTTEAVESTVATLEDSPEVIESPPEINTVQVTSTAV

SEQ ID NO: 3287 - protein, 43 aa, Artificial sequence
  Synthetic peptide
MAIPPKKNQDKTEIPTINTIASGEPTSTPTTEAVESTVATLED

SEQ ID NO: 3288 - protein, 43 aa, Artificial sequence
  Synthetic peptide
AIPPKKNQDKTEIPTINTIASGEPTSTPTTEAVESTVATLEDS

SEQ ID NO: 3289 - protein, 43 aa, Artificial sequence
  Synthetic peptide
IPPKKNQDKTEIPTINTIASGEPTSTPTTEAVESTVATLEDSP

SEQ ID NO: 3290 - protein, 43 aa, Artificial sequence
  Synthetic peptide
PPKKNQDKTEIPTINTIASGEPTSTPTTEAVESTVATLEDSPE

SEQ ID NO: 3291 - protein, 43 aa, Artificial sequence
  Synthetic peptide
PKKNQDKTEIPTINTIASGEPTSTPTTEAVESTVATLEDSPEV

SEQ ID NO: 3292 - protein, 43 aa, Artificial sequence
  Synthetic peptide
KKNQDKTEIPTINTIASGEPTSTPTTEAVESTVATLEDSPEVI

SEQ ID NO: 3293 - protein, 43 aa, Artificial sequence
  Synthetic peptide
KNQDKTEIPTINTIASGEPTSTPTTEAVESTVATLEDSPEVIE

SEQ ID NO: 3294 - protein, 43 aa, Artificial sequence
  Synthetic peptide
NQDKTEIPTINTIASGEPTSTPTTEAVESTVATLEDSPEVIES

SEQ ID NO: 3295 - protein, 43 aa, Artificial sequence
  Synthetic peptide
QDKTEIPTINTIASGEPTSTPTTEAVESTVATLEDSPEVIESP

SEQ ID NO: 3296 - protein, 43 aa, Artificial sequence
  Synthetic peptide
DKTEIPTINTIASGEPTSTPTTEAVESTVATLEDSPEVIESPP

SEQ ID NO: 3297 - protein, 43 aa, Artificial sequence
  Synthetic peptide
KTEIPTINTIASGEPTSTPTTEAVESTVATLEDSPEVIESPPE

SEQ ID NO: 3298 - protein, 43 aa, Artificial sequence
  Synthetic peptide
TEIPTINTIASGEPTSTPTTEAVESTVATLEDSPEVIESPPEI

SEQ ID NO: 3299 - protein, 43 aa, Artificial sequence
  Synthetic peptide
EIPTINTIASGEPTSTPTTEAVESTVATLEDSPEVIESPPEIN

SEQ ID NO: 3300 - protein, 43 aa, Artificial sequence
  Synthetic peptide
IPTINTIASGEPTSTPTTEAVESTVATLEDSPEVIESPPEINT

SEQ ID NO: 3301 - protein, 43 aa, Artificial sequence
  Synthetic peptide
PTINTIASGEPTSTPTTEAVESTVATLEDSPEVIESPPEINTV

SEQ ID NO: 3302 - protein, 43 aa, Artificial sequence
  Synthetic peptide
TINTIASGEPTSTPTTEAVESTVATLEDSPEVIESPPEINTVQ

SEQ ID NO: 3303 - protein, 43 aa, Artificial sequence
  Synthetic peptide
INTIASGEPTSTPTTEAVESTVATLEDSPEVIESPPEINTVQV

SEQ ID NO: 3304 - protein, 43 aa, Artificial sequence
  Synthetic peptide
NTIASGEPTSTPTTEAVESTVATLEDSPEVIESPPEINTVQVT

SEQ ID NO: 3305 - protein, 43 aa, Artificial sequence
  Synthetic peptide
TIASGEPTSTPTTEAVESTVATLEDSPEVIESPPEINTVQVTS

SEQ ID NO: 3306 - protein, 43 aa, Artificial sequence
  Synthetic peptide
IASGEPTSTPTTEAVESTVATLEDSPEVIESPPEINTVQVTST

SEQ ID NO: 3307 - protein, 43 aa, Artificial sequence
  Synthetic peptide
ASGEPTSTPTTEAVESTVATLEDSPEVIESPPEINTVQVTSTA

SEQ ID NO: 3308 - protein, 43 aa, Artificial sequence
  Synthetic peptide
SGEPTSTPTTEAVESTVATLEDSPEVIESPPEINTVQVTSTAV

SEQ ID NO: 3309 - protein, 44 aa, Artificial sequence
  Synthetic peptide
MAIPPKKNQDKTEIPTINTIASGEPTSTPTTEAVESTVATLEDS

SEQ ID NO: 3310 - protein, 44 aa, Artificial sequence
  Synthetic peptide
AIPPKKNQDKTEIPTINTIASGEPTSTPTTEAVESTVATLEDSP

SEQ ID NO: 3311 - protein, 44 aa, Artificial sequence
  Synthetic peptide
IPPKKNQDKTEIPTINTIASGEPTSTPTTEAVESTVATLEDSPE

SEQ ID NO: 3312 - protein, 44 aa, Artificial sequence
  Synthetic peptide
PPKKNQDKTEIPTINTIASGEPTSTPTTEAVESTVATLEDSPEV

SEQ ID NO: 3313 - protein, 44 aa, Artificial sequence
  Synthetic peptide
PKKNQDKTEIPTINTIASGEPTSTPTTEAVESTVATLEDSPEVI

SEQ ID NO: 3314 - protein, 44 aa, Artificial sequence
  Synthetic peptide
KKNQDKTEIPTINTIASGEPTSTPTTEAVESTVATLEDSPEVIE

SEQ ID NO: 3315 - protein, 44 aa, Artificial sequence
  Synthetic peptide
KNQDKTEIPTINTIASGEPTSTPTTEAVESTVATLEDSPEVIES

SEQ ID NO: 3316 - protein, 44 aa, Artificial sequence
  Synthetic peptide
NQDKTEIPTINTIASGEPTSTPTTEAVESTVATLEDSPEVIESP

SEQ ID NO: 3317 - protein, 44 aa, Artificial sequence
  Synthetic peptide
QDKTEIPTINTIASGEPTSTPTTEAVESTVATLEDSPEVIESPP

SEQ ID NO: 3318 - protein, 44 aa, Artificial sequence
  Synthetic peptide
DKTEIPTINTIASGEPTSTPTTEAVESTVATLEDSPEVIESPPE

SEQ ID NO: 3319 - protein, 44 aa, Artificial sequence
  Synthetic peptide
KTEIPTINTIASGEPTSTPTTEAVESTVATLEDSPEVIESPPEI

SEQ ID NO: 3320 - protein, 44 aa, Artificial sequence
  Synthetic peptide
TEIPTINTIASGEPTSTPTTEAVESTVATLEDSPEVIESPPEIN

SEQ ID NO: 3321 - protein, 44 aa, Artificial sequence
  Synthetic peptide
EIPTINTIASGEPTSTPTTEAVESTVATLEDSPEVIESPPEINT

SEQ ID NO: 3322 - protein, 44 aa, Artificial sequence
  Synthetic peptide
IPTINTIASGEPTSTPTTEAVESTVATLEDSPEVIESPPEINTV

SEQ ID NO: 3323 - protein, 44 aa, Artificial sequence
  Synthetic peptide
PTINTIASGEPTSTPTTEAVESTVATLEDSPEVIESPPEINTVQ

SEQ ID NO: 3324 - protein, 44 aa, Artificial sequence
  Synthetic peptide
TINTIASGEPTSTPTTEAVESTVATLEDSPEVIESPPEINTVQV

SEQ ID NO: 3325 - protein, 44 aa, Artificial sequence
  Synthetic peptide
INTIASGEPTSTPTTEAVESTVATLEDSPEVIESPPEINTVQVT

SEQ ID NO: 3326 - protein, 44 aa, Artificial sequence
  Synthetic peptide
NTIASGEPTSTPTTEAVESTVATLEDSPEVIESPPEINTVQVTS

SEQ ID NO: 3327 - protein, 44 aa, Artificial sequence
  Synthetic peptide
TIASGEPTSTPTTEAVESTVATLEDSPEVIESPPEINTVQVTST

SEQ ID NO: 3328 - protein, 44 aa, Artificial sequence
  Synthetic peptide
IASGEPTSTPTTEAVESTVATLEDSPEVIESPPEINTVQVTSTA

SEQ ID NO: 3329 - protein, 44 aa, Artificial sequence
  Synthetic peptide
ASGEPTSTPTTEAVESTVATLEDSPEVIESPPEINTVQVTSTAV

SEQ ID NO: 3330 - protein, 45 aa, Artificial sequence
  Synthetic peptide
MAIPPKKNQDKTEIPTINTIASGEPTSTPTTEAVESTVATLEDSP

SEQ ID NO: 3331 - protein, 45 aa, Artificial sequence
  Synthetic peptide
AIPPKKNQDKTEIPTINTIASGEPTSTPTTEAVESTVATLEDSPE

SEQ ID NO: 3332 - protein, 45 aa, Artificial sequence
  Synthetic peptide
IPPKKNQDKTEIPTINTIASGEPTSTPTTEAVESTVATLEDSPEV

SEQ ID NO: 3333 - protein, 45 aa, Artificial sequence
  Synthetic peptide
PPKKNQDKTEIPTINTIASGEPTSTPTTEAVESTVATLEDSPEVI

SEQ ID NO: 3334 - protein, 45 aa, Artificial sequence
  Synthetic peptide
PKKNQDKTEIPTINTIASGEPTSTPTTEAVESTVATLEDSPEVIE

SEQ ID NO: 3335 - protein, 45 aa, Artificial sequence
  Synthetic peptide
KKNQDKTEIPTINTIASGEPTSTPTTEAVESTVATLEDSPEVIES

SEQ ID NO: 3336 - protein, 45 aa, Artificial sequence
  Synthetic peptide
KNQDKTEIPTINTIASGEPTSTPTTEAVESTVATLEDSPEVIESP

SEQ ID NO: 3337 - protein, 45 aa, Artificial sequence
  Synthetic peptide
NQDKTEIPTINTIASGEPTSTPTTEAVESTVATLEDSPEVIESPP

SEQ ID NO: 3338 - protein, 45 aa, Artificial sequence
  Synthetic peptide
QDKTEIPTINTIASGEPTSTPTTEAVESTVATLEDSPEVIESPPE

SEQ ID NO: 3339 - protein, 45 aa, Artificial sequence
  Synthetic peptide
DKTEIPTINTIASGEPTSTPTTEAVESTVATLEDSPEVIESPPEI

SEQ ID NO: 3340 - protein, 45 aa, Artificial sequence
  Synthetic peptide
KTEIPTINTIASGEPTSTPTTEAVESTVATLEDSPEVIESPPEIN

SEQ ID NO: 3341 - protein, 45 aa, Artificial sequence
  Synthetic peptide
TEIPTINTIASGEPTSTPTTEAVESTVATLEDSPEVIESPPEINT

SEQ ID NO: 3342 - protein, 45 aa, Artificial sequence
  Synthetic peptide
EIPTINTIASGEPTSTPTTEAVESTVATLEDSPEVIESPPEINTV

SEQ ID NO: 3343 - protein, 45 aa, Artificial sequence
  Synthetic peptide
IPTINTIASGEPTSTPTTEAVESTVATLEDSPEVIESPPEINTVQ

SEQ ID NO: 3344 - protein, 45 aa, Artificial sequence
  Synthetic peptide
PTINTIASGEPTSTPTTEAVESTVATLEDSPEVIESPPEINTVQV

SEQ ID NO: 3345 - protein, 45 aa, Artificial sequence
  Synthetic peptide
TINTIASGEPTSTPTTEAVESTVATLEDSPEVIESPPEINTVQVT

SEQ ID NO: 3346 - protein, 45 aa, Artificial sequence
  Synthetic peptide
INTIASGEPTSTPTTEAVESTVATLEDSPEVIESPPEINTVQVTS

SEQ ID NO: 3347 - protein, 45 aa, Artificial sequence
  Synthetic peptide
NTIASGEPTSTPTTEAVESTVATLEDSPEVIESPPEINTVQVTST

SEQ ID NO: 3348 - protein, 45 aa, Artificial sequence
  Synthetic peptide
TIASGEPTSTPTTEAVESTVATLEDSPEVIESPPEINTVQVTSTA

SEQ ID NO: 3349 - protein, 45 aa, Artificial sequence
  Synthetic peptide
IASGEPTSTPTTEAVESTVATLEDSPEVIESPPEINTVQVTSTAV

SEQ ID NO: 3350 - protein, 46 aa, Artificial sequence
  Synthetic peptide
MAIPPKKNQDKTEIPTINTIASGEPTSTPTTEAVESTVATLEDSPE

SEQ ID NO: 3351 - protein, 46 aa, Artificial sequence
  Synthetic peptide
AIPPKKNQDKTEIPTINTIASGEPTSTPTTEAVESTVATLEDSPEV

SEQ ID NO: 3352 - protein, 46 aa, Artificial sequence
  Synthetic peptide
IPPKKNQDKTEIPTINTIASGEPTSTPTTEAVESTVATLEDSPEVI

SEQ ID NO: 3353 - protein, 46 aa, Artificial sequence
  Synthetic peptide
PPKKNQDKTEIPTINTIASGEPTSTPTTEAVESTVATLEDSPEVIE

SEQ ID NO: 3354 - protein, 46 aa, Artificial sequence
  Synthetic peptide
PKKNQDKTEIPTINTIASGEPTSTPTTEAVESTVATLEDSPEVIES

SEQ ID NO: 3355 - protein, 46 aa, Artificial sequence
  Synthetic peptide
KKNQDKTEIPTINTIASGEPTSTPTTEAVESTVATLEDSPEVIESP

SEQ ID NO: 3356 - protein, 46 aa, Artificial sequence
  Synthetic peptide
KNQDKTEIPTINTIASGEPTSTPTTEAVESTVATLEDSPEVIESPP

SEQ ID NO: 3357 - protein, 46 aa, Artificial sequence
  Synthetic peptide
NQDKTEIPTINTIASGEPTSTPTTEAVESTVATLEDSPEVIESPPE

SEQ ID NO: 3358 - protein, 46 aa, Artificial sequence
  Synthetic peptide
QDKTEIPTINTIASGEPTSTPTTEAVESTVATLEDSPEVIESPPEI

SEQ ID NO: 3359 - protein, 46 aa, Artificial sequence
  Synthetic peptide
DKTEIPTINTIASGEPTSTPTTEAVESTVATLEDSPEVIESPPEIN

SEQ ID NO: 3360 - protein, 46 aa, Artificial sequence
  Synthetic peptide
KTEIPTINTIASGEPTSTPTTEAVESTVATLEDSPEVIESPPEINT

SEQ ID NO: 3361 - protein, 46 aa, Artificial sequence
  Synthetic peptide
TEIPTINTIASGEPTSTPTTEAVESTVATLEDSPEVIESPPEINTV

SEQ ID NO: 3362 - protein, 46 aa, Artificial sequence
  Synthetic peptide
EIPTINTIASGEPTSTPTTEAVESTVATLEDSPEVIESPPEINTVQ

SEQ ID NO: 3363 - protein, 46 aa, Artificial sequence
  Synthetic peptide
IPTINTIASGEPTSTPTTEAVESTVATLEDSPEVIESPPEINTVQV

SEQ ID NO: 3364 - protein, 46 aa, Artificial sequence
  Synthetic peptide
PTINTIASGEPTSTPTTEAVESTVATLEDSPEVIESPPEINTVQVT

SEQ ID NO: 3365 - protein, 46 aa, Artificial sequence
  Synthetic peptide
TINTIASGEPTSTPTTEAVESTVATLEDSPEVIESPPEINTVQVTS

SEQ ID NO: 3366 - protein, 46 aa, Artificial sequence
  Synthetic peptide
INTIASGEPTSTPTTEAVESTVATLEDSPEVIESPPEINTVQVTST

SEQ ID NO: 3367 - protein, 46 aa, Artificial sequence
  Synthetic peptide
NTIASGEPTSTPTTEAVESTVATLEDSPEVIESPPEINTVQVTSTA

SEQ ID NO: 3368 - protein, 46 aa, Artificial sequence
  Synthetic peptide
TIASGEPTSTPTTEAVESTVATLEDSPEVIESPPEINTVQVTSTAV

SEQ ID NO: 3369 - protein, 47 aa, Artificial sequence
  Synthetic peptide
MAIPPKKNQDKTEIPTINTIASGEPTSTPTTEAVESTVATLEDSPEV

SEQ ID NO: 3370 - protein, 47 aa, Artificial sequence
  Synthetic peptide
AIPPKKNQDKTEIPTINTIASGEPTSTPTTEAVESTVATLEDSPEVI

SEQ ID NO: 3371 - protein, 47 aa, Artificial sequence
  Synthetic peptide
IPPKKNQDKTEIPTINTIASGEPTSTPTTEAVESTVATLEDSPEVIE

SEQ ID NO: 3372 - protein, 47 aa, Artificial sequence
  Synthetic peptide
PPKKNQDKTEIPTINTIASGEPTSTPTTEAVESTVATLEDSPEVIES

SEQ ID NO: 3373 - protein, 47 aa, Artificial sequence
  Synthetic peptide
PKKNQDKTEIPTINTIASGEPTSTPTTEAVESTVATLEDSPEVIESP

SEQ ID NO: 3374 - protein, 47 aa, Artificial sequence
  Synthetic peptide
KKNQDKTEIPTINTIASGEPTSTPTTEAVESTVATLEDSPEVIESPP

SEQ ID NO: 3375 - protein, 47 aa, Artificial sequence
  Synthetic peptide
KNQDKTEIPTINTIASGEPTSTPTTEAVESTVATLEDSPEVIESPPE

SEQ ID NO: 3376 - protein, 47 aa, Artificial sequence
  Synthetic peptide
NQDKTEIPTINTIASGEPTSTPTTEAVESTVATLEDSPEVIESPPEI

SEQ ID NO: 3377 - protein, 47 aa, Artificial sequence
  Synthetic peptide
QDKTEIPTINTIASGEPTSTPTTEAVESTVATLEDSPEVIESPPEIN

SEQ ID NO: 3378 - protein, 47 aa, Artificial sequence
  Synthetic peptide
DKTEIPTINTIASGEPTSTPTTEAVESTVATLEDSPEVIESPPEINT

SEQ ID NO: 3379 - protein, 47 aa, Artificial sequence
  Synthetic peptide
KTEIPTINTIASGEPTSTPTTEAVESTVATLEDSPEVIESPPEINTV

SEQ ID NO: 3380 - protein, 47 aa, Artificial sequence
  Synthetic peptide
TEIPTINTIASGEPTSTPTTEAVESTVATLEDSPEVIESPPEINTVQ

SEQ ID NO: 3381 - protein, 47 aa, Artificial sequence
  Synthetic peptide
EIPTINTIASGEPTSTPTTEAVESTVATLEDSPEVIESPPEINTVQV

SEQ ID NO: 3382 - protein, 47 aa, Artificial sequence
  Synthetic peptide
IPTINTIASGEPTSTPTTEAVESTVATLEDSPEVIESPPEINTVQVT

SEQ ID NO: 3383 - protein, 47 aa, Artificial sequence
  Synthetic peptide
PTINTIASGEPTSTPTTEAVESTVATLEDSPEVIESPPEINTVQVTS

SEQ ID NO: 3384 - protein, 47 aa, Artificial sequence
  Synthetic peptide
TINTIASGEPTSTPTTEAVESTVATLEDSPEVIESPPEINTVQVTST

SEQ ID NO: 3385 - protein, 47 aa, Artificial sequence
  Synthetic peptide
INTIASGEPTSTPTTEAVESTVATLEDSPEVIESPPEINTVQVTSTA

SEQ ID NO: 3386 - protein, 47 aa, Artificial sequence
  Synthetic peptide
NTIASGEPTSTPTTEAVESTVATLEDSPEVIESPPEINTVQVTSTAV

SEQ ID NO: 3387 - protein, 48 aa, Artificial sequence
  Synthetic peptide
MAIPPKKNQDKTEIPTINTIASGEPTSTPTTEAVESTVATLEDSPEVI

SEQ ID NO: 3388 - protein, 48 aa, Artificial sequence
  Synthetic peptide
AIPPKKNQDKTEIPTINTIASGEPTSTPTTEAVESTVATLEDSPEVIE

SEQ ID NO: 3389 - protein, 48 aa, Artificial sequence
  Synthetic peptide
IPPKKNQDKTEIPTINTIASGEPTSTPTTEAVESTVATLEDSPEVIES

SEQ ID NO: 3390 - protein, 48 aa, Artificial sequence
  Synthetic peptide
PPKKNQDKTEIPTINTIASGEPTSTPTTEAVESTVATLEDSPEVIESP

SEQ ID NO: 3391 - protein, 48 aa, Artificial sequence
  Synthetic peptide
PKKNQDKTEIPTINTIASGEPTSTPTTEAVESTVATLEDSPEVIESPP

SEQ ID NO: 3392 - protein, 48 aa, Artificial sequence
  Synthetic peptide
KKNQDKTEIPTINTIASGEPTSTPTTEAVESTVATLEDSPEVIESPPE

SEQ ID NO: 3393 - protein, 48 aa, Artificial sequence
  Synthetic peptide
KNQDKTEIPTINTIASGEPTSTPTTEAVESTVATLEDSPEVIESPPEI

SEQ ID NO: 3394 - protein, 48 aa, Artificial sequence
  Synthetic peptide
NQDKTEIPTINTIASGEPTSTPTTEAVESTVATLEDSPEVIESPPEIN

SEQ ID NO: 3395 - protein, 48 aa, Artificial sequence
  Synthetic peptide
QDKTEIPTINTIASGEPTSTPTTEAVESTVATLEDSPEVIESPPEINT

SEQ ID NO: 3396 - protein, 48 aa, Artificial sequence
  Synthetic peptide
DKTEIPTINTIASGEPTSTPTTEAVESTVATLEDSPEVIESPPEINTV

SEQ ID NO: 3397 - protein, 48 aa, Artificial sequence
  Synthetic peptide
KTEIPTINTIASGEPTSTPTTEAVESTVATLEDSPEVIESPPEINTVQ

SEQ ID NO: 3398 - protein, 48 aa, Artificial sequence
  Synthetic peptide
TEIPTINTIASGEPTSTPTTEAVESTVATLEDSPEVIESPPEINTVQV

SEQ ID NO: 3399 - protein, 48 aa, Artificial sequence
  Synthetic peptide
EIPTINTIASGEPTSTPTTEAVESTVATLEDSPEVIESPPEINTVQVT

SEQ ID NO: 3400 - protein, 48 aa, Artificial sequence
  Synthetic peptide
IPTINTIASGEPTSTPTTEAVESTVATLEDSPEVIESPPEINTVQVTS

SEQ ID NO: 3401 - protein, 48 aa, Artificial sequence
  Synthetic peptide
PTINTIASGEPTSTPTTEAVESTVATLEDSPEVIESPPEINTVQVTST

SEQ ID NO: 3402 - protein, 48 aa, Artificial sequence
  Synthetic peptide
TINTIASGEPTSTPTTEAVESTVATLEDSPEVIESPPEINTVQVTSTA

SEQ ID NO: 3403 - protein, 48 aa, Artificial sequence
  Synthetic peptide
INTIASGEPTSTPTTEAVESTVATLEDSPEVIESPPEINTVQVTSTAV

SEQ ID NO: 3404 - protein, 49 aa, Artificial sequence
  Synthetic peptide
MAIPPKKNQDKTEIPTINTIASGEPTSTPTTEAVESTVATLEDSPEVIE

SEQ ID NO: 3405 - protein, 49 aa, Artificial sequence
  Synthetic peptide
AIPPKKNQDKTEIPTINTIASGEPTSTPTTEAVESTVATLEDSPEVIES

SEQ ID NO: 3406 - protein, 49 aa, Artificial sequence
  Synthetic peptide
IPPKKNQDKTEIPTINTIASGEPTSTPTTEAVESTVATLEDSPEVIESP

SEQ ID NO: 3407 - protein, 49 aa, Artificial sequence
  Synthetic peptide
PPKKNQDKTEIPTINTIASGEPTSTPTTEAVESTVATLEDSPEVIESPP

SEQ ID NO: 3408 - protein, 49 aa, Artificial sequence
  Synthetic peptide
PKKNQDKTEIPTINTIASGEPTSTPTTEAVESTVATLEDSPEVIESPPE

SEQ ID NO: 3409 - protein, 49 aa, Artificial sequence
  Synthetic peptide
KKNQDKTEIPTINTIASGEPTSTPTTEAVESTVATLEDSPEVIESPPEI

SEQ ID NO: 3410 - protein, 49 aa, Artificial sequence
  Synthetic peptide
KNQDKTEIPTINTIASGEPTSTPTTEAVESTVATLEDSPEVIESPPEIN

SEQ ID NO: 3411 - protein, 49 aa, Artificial sequence
  Synthetic peptide
NQDKTEIPTINTIASGEPTSTPTTEAVESTVATLEDSPEVIESPPEINT

SEQ ID NO: 3412 - protein, 49 aa, Artificial sequence
  Synthetic peptide
QDKTEIPTINTIASGEPTSTPTTEAVESTVATLEDSPEVIESPPEINTV

SEQ ID NO: 3413 - protein, 49 aa, Artificial sequence
  Synthetic peptide
DKTEIPTINTIASGEPTSTPTTEAVESTVATLEDSPEVIESPPEINTVQ

SEQ ID NO: 3414 - protein, 49 aa, Artificial sequence
  Synthetic peptide
KTEIPTINTIASGEPTSTPTTEAVESTVATLEDSPEVIESPPEINTVQV

SEQ ID NO: 3415 - protein, 49 aa, Artificial sequence
  Synthetic peptide
TEIPTINTIASGEPTSTPTTEAVESTVATLEDSPEVIESPPEINTVQVT

SEQ ID NO: 3416 - protein, 49 aa, Artificial sequence
  Synthetic peptide
EIPTINTIASGEPTSTPTTEAVESTVATLEDSPEVIESPPEINTVQVTS

SEQ ID NO: 3417 - protein, 49 aa, Artificial sequence
  Synthetic peptide
IPTINTIASGEPTSTPTTEAVESTVATLEDSPEVIESPPEINTVQVTST

SEQ ID NO: 3418 - protein, 49 aa, Artificial sequence
  Synthetic peptide
PTINTIASGEPTSTPTTEAVESTVATLEDSPEVIESPPEINTVQVTSTA

SEQ ID NO: 3419 - protein, 49 aa, Artificial sequence
  Synthetic peptide
TINTIASGEPTSTPTTEAVESTVATLEDSPEVIESPPEINTVQVTSTAV

SEQ ID NO: 3420 - protein, 50 aa, Artificial sequence
  Synthetic peptide
MAIPPKKNQDKTEIPTINTIASGEPTSTPTTEAVESTVATLEDSPEVIES

SEQ ID NO: 3421 - protein, 50 aa, Artificial sequence
  Synthetic peptide
AIPPKKNQDKTEIPTINTIASGEPTSTPTTEAVESTVATLEDSPEVIESP

SEQ ID NO: 3422 - protein, 50 aa, Artificial sequence
  Synthetic peptide
IPPKKNQDKTEIPTINTIASGEPTSTPTTEAVESTVATLEDSPEVIESPP

SEQ ID NO: 3423 - protein, 50 aa, Artificial sequence
  Synthetic peptide
PPKKNQDKTEIPTINTIASGEPTSTPTTEAVESTVATLEDSPEVIESPPE

SEQ ID NO: 3424 - protein, 50 aa, Artificial sequence
  Synthetic peptide
PKKNQDKTEIPTINTIASGEPTSTPTTEAVESTVATLEDSPEVIESPPEI

SEQ ID NO: 3425 - protein, 50 aa, Artificial sequence
  Synthetic peptide
KKNQDKTEIPTINTIASGEPTSTPTTEAVESTVATLEDSPEVIESPPEIN

SEQ ID NO: 3426 - protein, 50 aa, Artificial sequence
  Synthetic peptide
KNQDKTEIPTINTIASGEPTSTPTTEAVESTVATLEDSPEVIESPPEINT

SEQ ID NO: 3427 - protein, 50 aa, Artificial sequence
  Synthetic peptide
NQDKTEIPTINTIASGEPTSTPTTEAVESTVATLEDSPEVIESPPEINTV

SEQ ID NO: 3428 - protein, 50 aa, Artificial sequence
  Synthetic peptide
QDKTEIPTINTIASGEPTSTPTTEAVESTVATLEDSPEVIESPPEINTVQ

SEQ ID NO: 3429 - protein, 50 aa, Artificial sequence
  Synthetic peptide
DKTEIPTINTIASGEPTSTPTTEAVESTVATLEDSPEVIESPPEINTVQV

SEQ ID NO: 3430 - protein, 50 aa, Artificial sequence
  Synthetic peptide
KTEIPTINTIASGEPTSTPTTEAVESTVATLEDSPEVIESPPEINTVQVT

SEQ ID NO: 3431 - protein, 50 aa, Artificial sequence
  Synthetic peptide
TEIPTINTIASGEPTSTPTTEAVESTVATLEDSPEVIESPPEINTVQVTS

SEQ ID NO: 3432 - protein, 50 aa, Artificial sequence
  Synthetic peptide
EIPTINTIASGEPTSTPTTEAVESTVATLEDSPEVIESPPEINTVQVTST

SEQ ID NO: 3433 - protein, 50 aa, Artificial sequence
  Synthetic peptide
IPTINTIASGEPTSTPTTEAVESTVATLEDSPEVIESPPEINTVQVTSTA

SEQ ID NO: 3434 - protein, 50 aa, Artificial sequence
  Synthetic peptide
PTINTIASGEPTSTPTTEAVESTVATLEDSPEVIESPPEINTVQVTSTAV

SEQ ID NO: 3435 - protein, 51 aa, Artificial sequence
  Synthetic peptide
MAIPPKKNQDKTEIPTINTIASGEPTSTPTTEAVESTVATLEDSPEVIESP

SEQ ID NO: 3436 - protein, 51 aa, Artificial sequence
  Synthetic peptide
AIPPKKNQDKTEIPTINTIASGEPTSTPTTEAVESTVATLEDSPEVIESPP

SEQ ID NO: 3437 - protein, 51 aa, Artificial sequence
  Synthetic peptide
IPPKKNQDKTEIPTINTIASGEPTSTPTTEAVESTVATLEDSPEVIESPPE

SEQ ID NO: 3438 - protein, 51 aa, Artificial sequence
  Synthetic peptide
PPKKNQDKTEIPTINTIASGEPTSTPTTEAVESTVATLEDSPEVIESPPEI

SEQ ID NO: 3439 - protein, 51 aa, Artificial sequence
  Synthetic peptide
PKKNQDKTEIPTINTIASGEPTSTPTTEAVESTVATLEDSPEVIESPPEIN

SEQ ID NO: 3440 - protein, 51 aa, Artificial sequence
  Synthetic peptide
KKNQDKTEIPTINTIASGEPTSTPTTEAVESTVATLEDSPEVIESPPEINT

SEQ ID NO: 3441 - protein, 51 aa, Artificial sequence
  Synthetic peptide
KNQDKTEIPTINTIASGEPTSTPTTEAVESTVATLEDSPEVIESPPEINTV

SEQ ID NO: 3442 - protein, 51 aa, Artificial sequence
  Synthetic peptide
NQDKTEIPTINTIASGEPTSTPTTEAVESTVATLEDSPEVIESPPEINTVQ

SEQ ID NO: 3443 - protein, 51 aa, Artificial sequence
  Synthetic peptide
QDKTEIPTINTIASGEPTSTPTTEAVESTVATLEDSPEVIESPPEINTVQV

SEQ ID NO: 3444 - protein, 51 aa, Artificial sequence
  Synthetic peptide
DKTEIPTINTIASGEPTSTPTTEAVESTVATLEDSPEVIESPPEINTVQVT

SEQ ID NO: 3445 - protein, 51 aa, Artificial sequence
  Synthetic peptide
KTEIPTINTIASGEPTSTPTTEAVESTVATLEDSPEVIESPPEINTVQVTS

SEQ ID NO: 3446 - protein, 51 aa, Artificial sequence
  Synthetic peptide
TEIPTINTIASGEPTSTPTTEAVESTVATLEDSPEVIESPPEINTVQVTST

SEQ ID NO: 3447 - protein, 51 aa, Artificial sequence
  Synthetic peptide
EIPTINTIASGEPTSTPTTEAVESTVATLEDSPEVIESPPEINTVQVTSTA

SEQ ID NO: 3448 - protein, 51 aa, Artificial sequence
  Synthetic peptide
IPTINTIASGEPTSTPTTEAVESTVATLEDSPEVIESPPEINTVQVTSTAV

SEQ ID NO: 3449 - protein, 52 aa, Artificial sequence
  Synthetic peptide
MAIPPKKNQDKTEIPTINTIASGEPTSTPTTEAVESTVATLEDSPEVIESPP

SEQ ID NO: 3450 - protein, 52 aa, Artificial sequence
  Synthetic peptide
AIPPKKNQDKTEIPTINTIASGEPTSTPTTEAVESTVATLEDSPEVIESPPE

SEQ ID NO: 3451 - protein, 52 aa, Artificial sequence
  Synthetic peptide
IPPKKNQDKTEIPTINTIASGEPTSTPTTEAVESTVATLEDSPEVIESPPEI

SEQ ID NO: 3452 - protein, 52 aa, Artificial sequence
  Synthetic peptide
PPKKNQDKTEIPTINTIASGEPTSTPTTEAVESTVATLEDSPEVIESPPEIN

SEQ ID NO: 3453 - protein, 52 aa, Artificial sequence
  Synthetic peptide
PKKNQDKTEIPTINTIASGEPTSTPTTEAVESTVATLEDSPEVIESPPEINT

SEQ ID NO: 3454 - protein, 52 aa, Artificial sequence
  Synthetic peptide
KKNQDKTEIPTINTIASGEPTSTPTTEAVESTVATLEDSPEVIESPPEINTV

SEQ ID NO: 3455 - protein, 52 aa, Artificial sequence
  Synthetic peptide
KNQDKTEIPTINTIASGEPTSTPTTEAVESTVATLEDSPEVIESPPEINTVQ

SEQ ID NO: 3456 - protein, 52 aa, Artificial sequence
  Synthetic peptide
NQDKTEIPTINTIASGEPTSTPTTEAVESTVATLEDSPEVIESPPEINTVQV

SEQ ID NO: 3457 - protein, 52 aa, Artificial sequence
  Synthetic peptide
QDKTEIPTINTIASGEPTSTPTTEAVESTVATLEDSPEVIESPPEINTVQVT

SEQ ID NO: 3458 - protein, 52 aa, Artificial sequence
  Synthetic peptide
DKTEIPTINTIASGEPTSTPTTEAVESTVATLEDSPEVIESPPEINTVQVTS

SEQ ID NO: 3459 - protein, 52 aa, Artificial sequence
  Synthetic peptide
KTEIPTINTIASGEPTSTPTTEAVESTVATLEDSPEVIESPPEINTVQVTST

SEQ ID NO: 3460 - protein, 52 aa, Artificial sequence
  Synthetic peptide
TEIPTINTIASGEPTSTPTTEAVESTVATLEDSPEVIESPPEINTVQVTSTA

SEQ ID NO: 3461 - protein, 52 aa, Artificial sequence
  Synthetic peptide
EIPTINTIASGEPTSTPTTEAVESTVATLEDSPEVIESPPEINTVQVTSTAV

SEQ ID NO: 3462 - protein, 53 aa, Artificial sequence
  Synthetic peptide
MAIPPKKNQDKTEIPTINTIASGEPTSTPTTEAVESTVATLEDSPEVIESPPE

SEQ ID NO: 3463 - protein, 53 aa, Artificial sequence
  Synthetic peptide
AIPPKKNQDKTEIPTINTIASGEPTSTPTTEAVESTVATLEDSPEVIESPPEI

SEQ ID NO: 3464 - protein, 53 aa, Artificial sequence
  Synthetic peptide
IPPKKNQDKTEIPTINTIASGEPTSTPTTEAVESTVATLEDSPEVIESPPEIN

SEQ ID NO: 3465 - protein, 53 aa, Artificial sequence
  Synthetic peptide
PPKKNQDKTEIPTINTIASGEPTSTPTTEAVESTVATLEDSPEVIESPPEINT

SEQ ID NO: 3466 - protein, 53 aa, Artificial sequence
  Synthetic peptide
PKKNQDKTEIPTINTIASGEPTSTPTTEAVESTVATLEDSPEVIESPPEINTV

SEQ ID NO: 3467 - protein, 53 aa, Artificial sequence
  Synthetic peptide
KKNQDKTEIPTINTIASGEPTSTPTTEAVESTVATLEDSPEVIESPPEINTVQ

SEQ ID NO: 3468 - protein, 53 aa, Artificial sequence
  Synthetic peptide
KNQDKTEIPTINTIASGEPTSTPTTEAVESTVATLEDSPEVIESPPEINTVQV

SEQ ID NO: 3469 - protein, 53 aa, Artificial sequence
  Synthetic peptide
NQDKTEIPTINTIASGEPTSTPTTEAVESTVATLEDSPEVIESPPEINTVQVT

SEQ ID NO: 3470 - protein, 53 aa, Artificial sequence
  Synthetic peptide
QDKTEIPTINTIASGEPTSTPTTEAVESTVATLEDSPEVIESPPEINTVQVTS

SEQ ID NO: 3471 - protein, 53 aa, Artificial sequence
  Synthetic peptide
DKTEIPTINTIASGEPTSTPTTEAVESTVATLEDSPEVIESPPEINTVQVTST

SEQ ID NO: 3472 - protein, 53 aa, Artificial sequence
  Synthetic peptide
KTEIPTINTIASGEPTSTPTTEAVESTVATLEDSPEVIESPPEINTVQVTSTA

SEQ ID NO: 3473 - protein, 53 aa, Artificial sequence
  Synthetic peptide
TEIPTINTIASGEPTSTPTTEAVESTVATLEDSPEVIESPPEINTVQVTSTAV

SEQ ID NO: 3474 - protein, 54 aa, Artificial sequence
  Synthetic peptide
MAIPPKKNQDKTEIPTINTIASGEPTSTPTTEAVESTVATLEDSPEVIESPPEI

SEQ ID NO: 3475 - protein, 54 aa, Artificial sequence
  Synthetic peptide
AIPPKKNQDKTEIPTINTIASGEPTSTPTTEAVESTVATLEDSPEVIESPPEIN

SEQ ID NO: 3476 - protein, 54 aa, Artificial sequence
  Synthetic peptide
IPPKKNQDKTEIPTINTIASGEPTSTPTTEAVESTVATLEDSPEVIESPPEINT

SEQ ID NO: 3477 - protein, 54 aa, Artificial sequence
  Synthetic peptide
PPKKNQDKTEIPTINTIASGEPTSTPTTEAVESTVATLEDSPEVIESPPEINTV

SEQ ID NO: 3478 - protein, 54 aa, Artificial sequence
  Synthetic peptide
PKKNQDKTEIPTINTIASGEPTSTPTTEAVESTVATLEDSPEVIESPPEINTVQ

SEQ ID NO: 3479 - protein, 54 aa, Artificial sequence
  Synthetic peptide
KKNQDKTEIPTINTIASGEPTSTPTTEAVESTVATLEDSPEVIESPPEINTVQV

SEQ ID NO: 3480 - protein, 54 aa, Artificial sequence
  Synthetic peptide
KNQDKTEIPTINTIASGEPTSTPTTEAVESTVATLEDSPEVIESPPEINTVQVT

SEQ ID NO: 3481 - protein, 54 aa, Artificial sequence
  Synthetic peptide
NQDKTEIPTINTIASGEPTSTPTTEAVESTVATLEDSPEVIESPPEINTVQVTS

SEQ ID NO: 3482 - protein, 54 aa, Artificial sequence
  Synthetic peptide
QDKTEIPTINTIASGEPTSTPTTEAVESTVATLEDSPEVIESPPEINTVQVTST

SEQ ID NO: 3483 - protein, 54 aa, Artificial sequence
  Synthetic peptide
DKTEIPTINTIASGEPTSTPTTEAVESTVATLEDSPEVIESPPEINTVQVTSTA

SEQ ID NO: 3484 - protein, 54 aa, Artificial sequence
  Synthetic peptide
KTEIPTINTIASGEPTSTPTTEAVESTVATLEDSPEVIESPPEINTVQVTSTAV

SEQ ID NO: 3485 - protein, 55 aa, Artificial sequence
  Synthetic peptide
MAIPPKKNQDKTEIPTINTIASGEPTSTPTTEAVESTVATLEDSPEVIESPPEIN

SEQ ID NO: 3486 - protein, 55 aa, Artificial sequence
  Synthetic peptide
AIPPKKNQDKTEIPTINTIASGEPTSTPTTEAVESTVATLEDSPEVIESPPEINT

SEQ ID NO: 3487 - protein, 55 aa, Artificial sequence
  Synthetic peptide
IPPKKNQDKTEIPTINTIASGEPTSTPTTEAVESTVATLEDSPEVIESPPEINTV

SEQ ID NO: 3488 - protein, 55 aa, Artificial sequence
  Synthetic peptide
PPKKNQDKTEIPTINTIASGEPTSTPTTEAVESTVATLEDSPEVIESPPEINTVQ

SEQ ID NO: 3489 - protein, 55 aa, Artificial sequence
  Synthetic peptide
PKKNQDKTEIPTINTIASGEPTSTPTTEAVESTVATLEDSPEVIESPPEINTVQV

SEQ ID NO: 3490 - protein, 55 aa, Artificial sequence
  Synthetic peptide
KKNQDKTEIPTINTIASGEPTSTPTTEAVESTVATLEDSPEVIESPPEINTVQVT

SEQ ID NO: 3491 - protein, 55 aa, Artificial sequence
  Synthetic peptide
KNQDKTEIPTINTIASGEPTSTPTTEAVESTVATLEDSPEVIESPPEINTVQVTS

SEQ ID NO: 3492 - protein, 55 aa, Artificial sequence
  Synthetic peptide
NQDKTEIPTINTIASGEPTSTPTTEAVESTVATLEDSPEVIESPPEINTVQVTST

SEQ ID NO: 3493 - protein, 55 aa, Artificial sequence
  Synthetic peptide
QDKTEIPTINTIASGEPTSTPTTEAVESTVATLEDSPEVIESPPEINTVQVTSTA

SEQ ID NO: 3494 - protein, 55 aa, Artificial sequence
  Synthetic peptide
DKTEIPTINTIASGEPTSTPTTEAVESTVATLEDSPEVIESPPEINTVQVTSTAV

SEQ ID NO: 3495 - protein, 56 aa, Artificial sequence
  Synthetic peptide
MAIPPKKNQDKTEIPTINTIASGEPTSTPTTEAVESTVATLEDSPEVIESPPEINT

SEQ ID NO: 3496 - protein, 56 aa, Artificial sequence
  Synthetic peptide
AIPPKKNQDKTEIPTINTIASGEPTSTPTTEAVESTVATLEDSPEVIESPPEINTV

SEQ ID NO: 3497 - protein, 56 aa, Artificial sequence
  Synthetic peptide
IPPKKNQDKTEIPTINTIASGEPTSTPTTEAVESTVATLEDSPEVIESPPEINTVQ

SEQ ID NO: 3498 - protein, 56 aa, Artificial sequence
  Synthetic peptide
PPKKNQDKTEIPTINTIASGEPTSTPTTEAVESTVATLEDSPEVIESPPEINTVQV

SEQ ID NO: 3499 - protein, 56 aa, Artificial sequence
  Synthetic peptide
PKKNQDKTEIPTINTIASGEPTSTPTTEAVESTVATLEDSPEVIESPPEINTVQVT

SEQ ID NO: 3500 - protein, 56 aa, Artificial sequence
  Synthetic peptide
KKNQDKTEIPTINTIASGEPTSTPTTEAVESTVATLEDSPEVIESPPEINTVQVTS

SEQ ID NO: 3501 - protein, 56 aa, Artificial sequence
  Synthetic peptide
KNQDKTEIPTINTIASGEPTSTPTTEAVESTVATLEDSPEVIESPPEINTVQVTST

SEQ ID NO: 3502 - protein, 56 aa, Artificial sequence
  Synthetic peptide
NQDKTEIPTINTIASGEPTSTPTTEAVESTVATLEDSPEVIESPPEINTVQVTSTA

SEQ ID NO: 3503 - protein, 56 aa, Artificial sequence
  Synthetic peptide
QDKTEIPTINTIASGEPTSTPTTEAVESTVATLEDSPEVIESPPEINTVQVTSTAV

SEQ ID NO: 3504 - protein, 57 aa, Artificial sequence
  Synthetic peptide
MAIPPKKNQDKTEIPTINTIASGEPTSTPTTEAVESTVATLEDSPEVIESPPEINTV

SEQ ID NO: 3505 - protein, 57 aa, Artificial sequence
  Synthetic peptide
AIPPKKNQDKTEIPTINTIASGEPTSTPTTEAVESTVATLEDSPEVIESPPEINTVQ

SEQ ID NO: 3506 - protein, 57 aa, Artificial sequence
  Synthetic peptide
IPPKKNQDKTEIPTINTIASGEPTSTPTTEAVESTVATLEDSPEVIESPPEINTVQV

SEQ ID NO: 3507 - protein, 57 aa, Artificial sequence
  Synthetic peptide
PPKKNQDKTEIPTINTIASGEPTSTPTTEAVESTVATLEDSPEVIESPPEINTVQVT

SEQ ID NO: 3508 - protein, 57 aa, Artificial sequence
  Synthetic peptide
PKKNQDKTEIPTINTIASGEPTSTPTTEAVESTVATLEDSPEVIESPPEINTVQVTS

SEQ ID NO: 3509 - protein, 57 aa, Artificial sequence
  Synthetic peptide
KKNQDKTEIPTINTIASGEPTSTPTTEAVESTVATLEDSPEVIESPPEINTVQVTST

SEQ ID NO: 3510 - protein, 57 aa, Artificial sequence
  Synthetic peptide
KNQDKTEIPTINTIASGEPTSTPTTEAVESTVATLEDSPEVIESPPEINTVQVTSTA

SEQ ID NO: 3511 - protein, 57 aa, Artificial sequence
  Synthetic peptide
NQDKTEIPTINTIASGEPTSTPTTEAVESTVATLEDSPEVIESPPEINTVQVTSTAV

SEQ ID NO: 3512 - protein, 58 aa, Artificial sequence
  Synthetic peptide
MAIPPKKNQDKTEIPTINTIASGEPTSTPTTEAVESTVATLEDSPEVIESPPEINTVQ

SEQ ID NO: 3513 - protein, 58 aa, Artificial sequence
  Synthetic peptide
AIPPKKNQDKTEIPTINTIASGEPTSTPTTEAVESTVATLEDSPEVIESPPEINTVQV

SEQ ID NO: 3514 - protein, 58 aa, Artificial sequence
  Synthetic peptide
IPPKKNQDKTEIPTINTIASGEPTSTPTTEAVESTVATLEDSPEVIESPPEINTVQVT

SEQ ID NO: 3515 - protein, 58 aa, Artificial sequence
  Synthetic peptide
PPKKNQDKTEIPTINTIASGEPTSTPTTEAVESTVATLEDSPEVIESPPEINTVQVTS

SEQ ID NO: 3516 - protein, 58 aa, Artificial sequence
  Synthetic peptide
PKKNQDKTEIPTINTIASGEPTSTPTTEAVESTVATLEDSPEVIESPPEINTVQVTST

SEQ ID NO: 3517 - protein, 58 aa, Artificial sequence
  Synthetic peptide
KKNQDKTEIPTINTIASGEPTSTPTTEAVESTVATLEDSPEVIESPPEINTVQVTSTA

SEQ ID NO: 3518 - protein, 58 aa, Artificial sequence
  Synthetic peptide
KNQDKTEIPTINTIASGEPTSTPTTEAVESTVATLEDSPEVIESPPEINTVQVTSTAV

SEQ ID NO: 3519 - protein, 59 aa, Artificial sequence
  Synthetic peptide
MAIPPKKNQDKTEIPTINTIASGEPTSTPTTEAVESTVATLEDSPEVIESPPEINTVQV

SEQ ID NO: 3520 - protein, 59 aa, Artificial sequence
  Synthetic peptide
AIPPKKNQDKTEIPTINTIASGEPTSTPTTEAVESTVATLEDSPEVIESPPEINTVQVT

SEQ ID NO: 3521 - protein, 59 aa, Artificial sequence
  Synthetic peptide
IPPKKNQDKTEIPTINTIASGEPTSTPTTEAVESTVATLEDSPEVIESPPEINTVQVTS

SEQ ID NO: 3522 - protein, 59 aa, Artificial sequence
  Synthetic peptide
PPKKNQDKTEIPTINTIASGEPTSTPTTEAVESTVATLEDSPEVIESPPEINTVQVTST

SEQ ID NO: 3523 - protein, 59 aa, Artificial sequence
  Synthetic peptide
PKKNQDKTEIPTINTIASGEPTSTPTTEAVESTVATLEDSPEVIESPPEINTVQVTSTA

SEQ ID NO: 3524 - protein, 59 aa, Artificial sequence
  Synthetic peptide
KKNQDKTEIPTINTIASGEPTSTPTTEAVESTVATLEDSPEVIESPPEINTVQVTSTAV

SEQ ID NO: 3525 - protein, 60 aa, Artificial sequence
  Synthetic peptide
MAIPPKKNQDKTEIPTINTIASGEPTSTPTTEAVESTVATLEDSPEVIESPPEINTVQVT

SEQ ID NO: 3526 - protein, 60 aa, Artificial sequence
  Synthetic peptide
AIPPKKNQDKTEIPTINTIASGEPTSTPTTEAVESTVATLEDSPEVIESPPEINTVQVTS

SEQ ID NO: 3527 - protein, 60 aa, Artificial sequence
  Synthetic peptide
IPPKKNQDKTEIPTINTIASGEPTSTPTTEAVESTVATLEDSPEVIESPPEINTVQVTST

SEQ ID NO: 3528 - protein, 60 aa, Artificial sequence
  Synthetic peptide
PPKKNQDKTEIPTINTIASGEPTSTPTTEAVESTVATLEDSPEVIESPPEINTVQVTSTA

SEQ ID NO: 3529 - protein, 60 aa, Artificial sequence
  Synthetic peptide
PKKNQDKTEIPTINTIASGEPTSTPTTEAVESTVATLEDSPEVIESPPEINTVQVTSTAV

SEQ ID NO: 3530 - protein, 61 aa, Artificial sequence
  Synthetic peptide
MAIPPKKNQDKTEIPTINTIASGEPTSTPTTEAVESTVATLEDSPEVIESPPEINTVQVTS

SEQ ID NO: 3531 - protein, 61 aa, Artificial sequence
  Synthetic peptide
AIPPKKNQDKTEIPTINTIASGEPTSTPTTEAVESTVATLEDSPEVIESPPEINTVQVTST

SEQ ID NO: 3532 - protein, 61 aa, Artificial sequence
  Synthetic peptide
IPPKKNQDKTEIPTINTIASGEPTSTPTTEAVESTVATLEDSPEVIESPPEINTVQVTSTA

SEQ ID NO: 3533 - protein, 61 aa, Artificial sequence
  Synthetic peptide
PPKKNQDKTEIPTINTIASGEPTSTPTTEAVESTVATLEDSPEVIESPPEINTVQVTSTAV

SEQ ID NO: 3534 - protein, 62 aa, Artificial sequence
  Synthetic peptide
MAIPPKKNQDKTEIPTINTIASGEPTSTPTTEAVESTVATLEDSPEVIESPPEINTVQVTST

SEQ ID NO: 3535 - protein, 62 aa, Artificial sequence
  Synthetic peptide
AIPPKKNQDKTEIPTINTIASGEPTSTPTTEAVESTVATLEDSPEVIESPPEINTVQVTSTA

SEQ ID NO: 3536 - protein, 62 aa, Artificial sequence
  Synthetic peptide
IPPKKNQDKTEIPTINTIASGEPTSTPTTEAVESTVATLEDSPEVIESPPEINTVQVTSTAV

SEQ ID NO: 3537 - protein, 63 aa, Artificial sequence
  Synthetic peptide
MAIPPKKNQDKTEIPTINTIASGEPTSTPTTEAVESTVATLEDSPEVIESPPEINTVQVTSTA

SEQ ID NO: 3538 - protein, 63 aa, Artificial sequence
  Synthetic peptide
AIPPKKNQDKTEIPTINTIASGEPTSTPTTEAVESTVATLEDSPEVIESPPEINTVQVTSTAV

SEQ ID NO: 3539 - protein, 64 aa, Artificial sequence; identical to SEQ ID NO: 29
  Synthetic peptide

SEQ ID NO: 3540 - protein, 2 aa, Artificial sequence
  Synthetic peptide
YQ

SEQ ID NO: 3541 - protein, 2 aa, Artificial sequence
  Synthetic peptide
QE

SEQ ID NO: 3542 - protein, 2 aa, Artificial sequence
  Synthetic peptide
EP

SEQ ID NO: 3543 - protein, 2 aa, Artificial sequence
  Synthetic peptide
PV

SEQ ID NO: 3544 - protein, 2 aa, Artificial sequence
  Synthetic peptide
VL

SEQ ID NO: 3545 - protein, 2 aa, Artificial sequence
  Synthetic peptide
LG

SEQ ID NO: 3546 - protein, 2 aa, Artificial sequence
  Synthetic peptide
GP

SEQ ID NO: 3547 - protein, 2 aa, Artificial sequence
  Synthetic peptide
PV

SEQ ID NO: 3548 - protein, 2 aa, Artificial sequence
  Synthetic peptide
VR

SEQ ID NO: 3549 - protein, 2 aa, Artificial sequence
  Synthetic peptide
RG

SEQ ID NO: 3550 - protein, 2 aa, Artificial sequence
  Synthetic peptide
GP

SEQ ID NO: 3551 - protein, 2 aa, Artificial sequence
  Synthetic peptide
PF

SEQ ID NO: 3552 - protein, 2 aa, Artificial sequence
  Synthetic peptide
FP

SEQ ID NO: 3553 - protein, 2 aa, Artificial sequence
  Synthetic peptide
PI

SEQ ID NO: 3554 - protein, 2 aa, Artificial sequence
  Synthetic peptide
II

SEQ ID NO: 3555 - protein, 2 aa, Artificial sequence
  Synthetic peptide
IV

SEQ ID NO: 3556 - protein, 3 aa, Artificial sequence
  Synthetic peptide
YQE

SEQ ID NO: 3557 - protein, 3 aa, Artificial sequence
  Synthetic peptide
QEP

SEQ ID NO: 3558 - protein, 3 aa, Artificial sequence
  Synthetic peptide
EPV

SEQ ID NO: 3559 - protein, 3 aa, Artificial sequence
  Synthetic peptide
PVL

SEQ ID NO: 3560 - protein, 3 aa, Artificial sequence
  Synthetic peptide
VLG

SEQ ID NO: 3561 - protein, 3 aa, Artificial sequence
  Synthetic peptide
LGP

SEQ ID NO: 3562 - protein, 3 aa, Artificial sequence
  Synthetic peptide
GPV

SEQ ID NO: 3563 - protein, 3 aa, Artificial sequence
  Synthetic peptide
PVR

SEQ ID NO: 3564 - protein, 3 aa, Artificial sequence
  Synthetic peptide
VRG

SEQ ID NO: 3565 - protein, 3 aa, Artificial sequence
  Synthetic peptide
RGP

SEQ ID NO: 3566 - protein, 3 aa, Artificial sequence
  Synthetic peptide
GPF

SEQ ID NO: 3567 - protein, 3 aa, Artificial sequence
  Synthetic peptide
PFP

SEQ ID NO: 3568 - protein, 3 aa, Artificial sequence
  Synthetic peptide
FPI

SEQ ID NO: 3569 - protein, 3 aa, Artificial sequence
  Synthetic peptide
PII

SEQ ID NO: 3570 - protein, 3 aa, Artificial sequence
  Synthetic peptide
IIV

SEQ ID NO: 3571 - protein, 4 aa, Artificial sequence
  Synthetic peptide
YQEP

SEQ ID NO: 3572 - protein, 4 aa, Artificial sequence
  Synthetic peptide
QEPV

SEQ ID NO: 3573 - protein, 4 aa, Artificial sequence
  Synthetic peptide
EPVL

SEQ ID NO: 3574 - protein, 4 aa, Artificial sequence
  Synthetic peptide
PVLG

SEQ ID NO: 3575 - protein, 4 aa, Artificial sequence
  Synthetic peptide
VLGP

SEQ ID NO: 3576 - protein, 4 aa, Artificial sequence
  Synthetic peptide
LGPV

SEQ ID NO: 3577 - protein, 4 aa, Artificial sequence
  Synthetic peptide
GPVR

SEQ ID NO: 3578 - protein, 4 aa, Artificial sequence
  Synthetic peptide
PVRG

SEQ ID NO: 3579 - protein, 4 aa, Artificial sequence
  Synthetic peptide
VRGP

SEQ ID NO: 3580 - protein, 4 aa, Artificial sequence
  Synthetic peptide
RGPF

SEQ ID NO: 3581 - protein, 4 aa, Artificial sequence
  Synthetic peptide
GPFP

SEQ ID NO: 3582 - protein, 4 aa, Artificial sequence
  Synthetic peptide
PFPI

SEQ ID NO: 3583 - protein, 4 aa, Artificial sequence
  Synthetic peptide
FPII

SEQ ID NO: 3584 - protein, 4 aa, Artificial sequence
  Synthetic peptide
PIIV

SEQ ID NO: 3585 - protein, 5 aa, Artificial sequence
  Synthetic peptide
YQEPV

SEQ ID NO: 3586 - protein, 5 aa, Artificial sequence
  Synthetic peptide
QEPVL

SEQ ID NO: 3587 - protein, 5 aa, Artificial sequence
  Synthetic peptide
EPVLG

SEQ ID NO: 3588 - protein, 5 aa, Artificial sequence
  Synthetic peptide
PVLGP

SEQ ID NO: 3589 - protein, 5 aa, Artificial sequence
  Synthetic peptide
VLGPV

SEQ ID NO: 3590 - protein, 5 aa, Artificial sequence
  Synthetic peptide
LGPVR

SEQ ID NO: 3591 - protein, 5 aa, Artificial sequence
  Synthetic peptide
GPVRG

SEQ ID NO: 3592 - protein, 5 aa, Artificial sequence
  Synthetic peptide
PVRGP

SEQ ID NO: 3593 - protein, 5 aa, Artificial sequence
  Synthetic peptide
VRGPF

SEQ ID NO: 3594 - protein, 5 aa, Artificial sequence
  Synthetic peptide
RGPFP

SEQ ID NO: 3595 - protein, 5 aa, Artificial sequence
  Synthetic peptide
GPFPI

SEQ ID NO: 3596 - protein, 5 aa, Artificial sequence
  Synthetic peptide
PFPII

SEQ ID NO: 3597 - protein, 5 aa, Artificial sequence
  Synthetic peptide
FPIIV

SEQ ID NO: 3598 - protein, 6 aa, Artificial sequence
  Synthetic peptide
YQEPVL

SEQ ID NO: 3599 - protein, 6 aa, Artificial sequence
  Synthetic peptide
QEPVLG

SEQ ID NO: 3600 - protein, 6 aa, Artificial sequence
  Synthetic peptide
EPVLGP

SEQ ID NO: 3601 - protein, 6 aa, Artificial sequence
  Synthetic peptide
PVLGPV

SEQ ID NO: 3602 - protein, 6 aa, Artificial sequence
  Synthetic peptide
VLGPVR

SEQ ID NO: 3603 - protein, 6 aa, Artificial sequence
  Synthetic peptide
LGPVRG

SEQ ID NO: 3604 - protein, 6 aa, Artificial sequence
  Synthetic peptide
GPVRGP

SEQ ID NO: 3605 - protein, 6 aa, Artificial sequence
  Synthetic peptide
PVRGPF

SEQ ID NO: 3606 - protein, 6 aa, Artificial sequence
  Synthetic peptide
VRGPFP

SEQ ID NO: 3607 - protein, 6 aa, Artificial sequence
  Synthetic peptide
RGPFPI

SEQ ID NO: 3608 - protein, 6 aa, Artificial sequence
  Synthetic peptide
GPFPII

SEQ ID NO: 3609 - protein, 6 aa, Artificial sequence
  Synthetic peptide
PFPIIV

SEQ ID NO: 3610 - protein, 7 aa, Artificial sequence
  Synthetic peptide
YQEPVLG

SEQ ID NO: 3611 - protein, 7 aa, Artificial sequence
  Synthetic peptide
QEPVLGP

SEQ ID NO: 3612 - protein, 7 aa, Artificial sequence
  Synthetic peptide
EPVLGPV

SEQ ID NO: 3613 - protein, 7 aa, Artificial sequence
  Synthetic peptide
PVLGPVR

SEQ ID NO: 3614 - protein, 7 aa, Artificial sequence
  Synthetic peptide
VLGPVRG

SEQ ID NO: 3615 - protein, 7 aa, Artificial sequence
  Synthetic peptide
LGPVRGP

SEQ ID NO: 3616 - protein, 7 aa, Artificial sequence
  Synthetic peptide
GPVRGPF

SEQ ID NO: 3617 - protein, 7 aa, Artificial sequence
  Synthetic peptide
PVRGPFP

SEQ ID NO: 3618 - protein, 7 aa, Artificial sequence
  Synthetic peptide
VRGPFPI

SEQ ID NO: 3619 - protein, 7 aa, Artificial sequence
  Synthetic peptide
RGPFPII

SEQ ID NO: 3620 - protein, 7 aa, Artificial sequence
  Synthetic peptide
GPFPIIV

SEQ ID NO: 3621 - protein, 8 aa, Artificial sequence
  Synthetic peptide
YQEPVLGP

SEQ ID NO: 3622 - protein, 8 aa, Artificial sequence
  Synthetic peptide
QEPVLGPV

SEQ ID NO: 3623 - protein, 8 aa, Artificial sequence
  Synthetic peptide
EPVLGPVR

SEQ ID NO: 3624 - protein, 8 aa, Artificial sequence
  Synthetic peptide
PVLGPVRG

SEQ ID NO: 3625 - protein, 8 aa, Artificial sequence
  Synthetic peptide
VLGPVRGP

SEQ ID NO: 3626 - protein, 8 aa, Artificial sequence
  Synthetic peptide
LGPVRGPF

SEQ ID NO: 3627 - protein, 8 aa, Artificial sequence
  Synthetic peptide
GPVRGPFP

SEQ ID NO: 3628 - protein, 8 aa, Artificial sequence
  Synthetic peptide
PVRGPFPI

SEQ ID NO: 3629 - protein, 8 aa, Artificial sequence
  Synthetic peptide
VRGPFPII

SEQ ID NO: 3630 - protein, 8 aa, Artificial sequence
  Synthetic peptide
RGPFPIIV

SEQ ID NO: 3631 - protein, 9 aa, Artificial sequence
  Synthetic peptide
YQEPVLGPV

SEQ ID NO: 3632 - protein, 9 aa, Artificial sequence
  Synthetic peptide
QEPVLGPVR

SEQ ID NO: 3633 - protein, 9 aa, Artificial sequence
  Synthetic peptide
EPVLGPVRG

SEQ ID NO: 3634 - protein, 9 aa, Artificial sequence
  Synthetic peptide
PVLGPVRGP

SEQ ID NO: 3635 - protein, 9 aa, Artificial sequence
  Synthetic peptide
VLGPVRGPF

SEQ ID NO: 3636 - protein, 9 aa, Artificial sequence
  Synthetic peptide
LGPVRGPFP

SEQ ID NO: 3637 - protein, 9 aa, Artificial sequence
  Synthetic peptide
GPVRGPFPI

SEQ ID NO: 3638 - protein, 9 aa, Artificial sequence
  Synthetic peptide
PVRGPFPII

SEQ ID NO: 3639 - protein, 9 aa, Artificial sequence
  Synthetic peptide
VRGPFPIIV

SEQ ID NO: 3640 - protein, 10 aa, Artificial sequence
  Synthetic peptide
YQEPVLGPVR

SEQ ID NO: 3641 - protein, 10 aa, Artificial sequence
  Synthetic peptide
QEPVLGPVRG

SEQ ID NO: 3642 - protein, 10 aa, Artificial sequence
  Synthetic peptide
EPVLGPVRGP

SEQ ID NO: 3643 - protein, 10 aa, Artificial sequence
  Synthetic peptide
PVLGPVRGPF

SEQ ID NO: 3644 - protein, 10 aa, Artificial sequence
  Synthetic peptide
VLGPVRGPFP

SEQ ID NO: 3645 - protein, 10 aa, Artificial sequence
  Synthetic peptide
LGPVRGPFPI

SEQ ID NO: 3646 - protein, 10 aa, Artificial sequence
  Synthetic peptide
GPVRGPFPII

SEQ ID NO: 3647 - protein, 10 aa, Artificial sequence
  Synthetic peptide
PVRGPFPIIV

SEQ ID NO: 3648 - protein, 11 aa, Artificial sequence
  Synthetic peptide
YQEPVLGPVRG

SEQ ID NO: 3649 - protein, 11 aa, Artificial sequence
  Synthetic peptide
QEPVLGPVRGP

SEQ ID NO: 3650 - protein, 11 aa, Artificial sequence
  Synthetic peptide
EPVLGPVRGPF

SEQ ID NO: 3651 - protein, 11 aa, Artificial sequence
  Synthetic peptide
PVLGPVRGPFP

SEQ ID NO: 3652 - protein, 11 aa, Artificial sequence
  Synthetic peptide
VLGPVRGPFPI

SEQ ID NO: 3653 - protein, 11 aa, Artificial sequence
  Synthetic peptide
LGPVRGPFPII

SEQ ID NO: 3654 - protein, 11 aa, Artificial sequence
  Synthetic peptide
GPVRGPFPIIV

SEQ ID NO: 3655 - protein, 12 aa, Artificial sequence
  Synthetic peptide
YQEPVLGPVRGP

SEQ ID NO: 3656 - protein, 12 aa, Artificial sequence
  Synthetic peptide
QEPVLGPVRGPF

SEQ ID NO: 3657 - protein, 12 aa, Artificial sequence
  Synthetic peptide
EPVLGPVRGPFP

SEQ ID NO: 3658 - protein, 12 aa, Artificial sequence
  Synthetic peptide
PVLGPVRGPFPI

SEQ ID NO: 3659 - protein, 12 aa, Artificial sequence
  Synthetic peptide
VLGPVRGPFPII

SEQ ID NO: 3660 - protein, 12 aa, Artificial sequence
  Synthetic peptide
LGPVRGPFPIIV

SEQ ID NO: 3661 - protein, 13 aa, Artificial sequence
  Synthetic peptide
YQEPVLGPVRGPF

SEQ ID NO: 3662 - protein, 13 aa, Artificial sequence
  Synthetic peptide
QEPVLGPVRGPFP

SEQ ID NO: 3663 - protein, 13 aa, Artificial sequence
  Synthetic peptide
EPVLGPVRGPFPI

SEQ ID NO: 3664 - protein, 13 aa, Artificial sequence
  Synthetic peptide
PVLGPVRGPFPII

SEQ ID NO: 3665 - protein, 13 aa, Artificial sequence
  Synthetic peptide
VLGPVRGPFPIIV

SEQ ID NO: 3666 - protein, 14 aa, Artificial sequence
  Synthetic peptide
YQEPVLGPVRGPFP

SEQ ID NO: 3667 - protein, 14 aa, Artificial sequence
  Synthetic peptide
QEPVLGPVRGPFPI

SEQ ID NO: 3668 - protein, 14 aa, Artificial sequence
  Synthetic peptide
EPVLGPVRGPFPII

SEQ ID NO: 3669 - protein, 14 aa, Artificial sequence
  Synthetic peptide
PVLGPVRGPFPIIV

SEQ ID NO: 3670 - protein, 15 aa, Artificial sequence
  Synthetic peptide
YQEPVLGPVRGPFPI

SEQ ID NO: 3671 - protein, 15 aa, Artificial sequence
  Synthetic peptide
QEPVLGPVRGPFPII

SEQ ID NO: 3672 - protein, 15 aa, Artificial sequence
  Synthetic peptide
EPVLGPVRGPFPIIV

SEQ ID NO: 3673 - protein, 16 aa, Artificial sequence
  Synthetic peptide
YQEPVLGPVRGPFPII

SEQ ID NO: 3674 - protein, 16 aa, Artificial sequence
  Synthetic peptide
QEPVLGPVRGPFPIIV

SEQ ID NO: 3675 - protein, 17 aa, Artificial sequence
  Synthetic peptide
YQEPVLGPVRGPFPIIV

SEQ ID NO: 3676 - protein, 2 aa, Artificial sequence
  Synthetic peptide
RP

SEQ ID NO: 3677 - protein, 2 aa, Artificial sequence
  Synthetic peptide
PK

SEQ ID NO: 3678 - protein, 2 aa, Artificial sequence
  Synthetic peptide
KH

SEQ ID NO: 3679 - protein, 2 aa, Artificial sequence
  Synthetic peptide
HP

SEQ ID NO: 3680 - protein, 2 aa, Artificial sequence
  Synthetic peptide
PI

SEQ ID NO: 3681 - protein, 2 aa, Artificial sequence
  Synthetic peptide
IK

SEQ ID NO: 3682 - protein, 2 aa, Artificial sequence
  Synthetic peptide
KH

SEQ ID NO: 3683 - protein, 2 aa, Artificial sequence
  Synthetic peptide
HQ

SEQ ID NO: 3684 - protein, 2 aa, Artificial sequence
  Synthetic peptide
QG

SEQ ID NO: 3685 - protein, 2 aa, Artificial sequence
  Synthetic peptide
GL

SEQ ID NO: 3686 - protein, 2 aa, Artificial sequence
  Synthetic peptide
LP

SEQ ID NO: 3687 - protein, 2 aa, Artificial sequence
  Synthetic peptide
PQ

SEQ ID NO: 3688 - protein, 2 aa, Artificial sequence
  Synthetic peptide
QE

SEQ ID NO: 3689 - protein, 2 aa, Artificial sequence
  Synthetic peptide
EV

SEQ ID NO: 3690 - protein, 2 aa, Artificial sequence
  Synthetic peptide
VL

SEQ ID NO: 3691 - protein, 2 aa, Artificial sequence
  Synthetic peptide
LN

SEQ ID NO: 3692 - protein, 2 aa, Artificial sequence
  Synthetic peptide
NE

SEQ ID NO: 3693 - protein, 2 aa, Artificial sequence
  Synthetic peptide
EN

SEQ ID NO: 3694 - protein, 2 aa, Artificial sequence
  Synthetic peptide
NL

SEQ ID NO: 3695 - protein, 2 aa, Artificial sequence
  Synthetic peptide
LL

SEQ ID NO: 3696 - protein, 2 aa, Artificial sequence
  Synthetic peptide
LR

SEQ ID NO: 3697 - protein, 2 aa, Artificial sequence
  Synthetic peptide
RF

SEQ ID NO: 3698 - protein, 2 aa, Artificial sequence
  Synthetic peptide
FF

SEQ ID NO: 3699 - protein, 2 aa, Artificial sequence
  Synthetic peptide
FV

SEQ ID NO: 3700 - protein, 2 aa, Artificial sequence
  Synthetic peptide
VA

SEQ ID NO: 3701 - protein, 3 aa, Artificial sequence
  Synthetic peptide
RPK

SEQ ID NO: 3702 - protein, 3 aa, Artificial sequence
  Synthetic peptide
PKH

SEQ ID NO: 3703 - protein, 3 aa, Artificial sequence
  Synthetic peptide
KHP

SEQ ID NO: 3704 - protein, 3 aa, Artificial sequence
  Synthetic peptide
HPI

SEQ ID NO: 3705 - protein, 3 aa, Artificial sequence
  Synthetic peptide
PIK

SEQ ID NO: 3706 - protein, 3 aa, Artificial sequence
  Synthetic peptide
IKH

SEQ ID NO: 3707 - protein, 3 aa, Artificial sequence
  Synthetic peptide
KHQ

SEQ ID NO: 3708 - protein, 3 aa, Artificial sequence
  Synthetic peptide
HQG

SEQ ID NO: 3709 - protein, 3 aa, Artificial sequence
  Synthetic peptide
QGL

SEQ ID NO: 3710 - protein, 3 aa, Artificial sequence
  Synthetic peptide
GLP

SEQ ID NO: 3711 - protein, 3 aa, Artificial sequence
  Synthetic peptide
LPQ

SEQ ID NO: 3712 - protein, 3 aa, Artificial sequence
  Synthetic peptide
PQE

SEQ ID NO: 3713 - protein, 3 aa, Artificial sequence
  Synthetic peptide
QEV

SEQ ID NO: 3714 - protein, 3 aa, Artificial sequence
  Synthetic peptide
EVL

SEQ ID NO: 3715 - protein, 3 aa, Artificial sequence
  Synthetic peptide
VLN

SEQ ID NO: 3716 - protein, 3 aa, Artificial sequence
  Synthetic peptide
LNE

SEQ ID NO: 3717 - protein, 3 aa, Artificial sequence
  Synthetic peptide
NEN

SEQ ID NO: 3718 - protein, 3 aa, Artificial sequence
  Synthetic peptide
ENL

SEQ ID NO: 3719 - protein, 3 aa, Artificial sequence
  Synthetic peptide
NLL

SEQ ID NO: 3720 - protein, 3 aa, Artificial sequence
  Synthetic peptide
LLR

SEQ ID NO: 3721 - protein, 3 aa, Artificial sequence
  Synthetic peptide
LRF

SEQ ID NO: 3722 - protein, 3 aa, Artificial sequence
  Synthetic peptide
RFF

SEQ ID NO: 3723 - protein, 3 aa, Artificial sequence
  Synthetic peptide
FFV

SEQ ID NO: 3724 - protein, 3 aa, Artificial sequence
  Synthetic peptide
FVA

SEQ ID NO: 3725 - protein, 4 aa, Artificial sequence
  Synthetic peptide
RPKH

SEQ ID NO: 3726 - protein, 4 aa, Artificial sequence
  Synthetic peptide
PKHP

SEQ ID NO: 3727 - protein, 4 aa, Artificial sequence
  Synthetic peptide
KHPI

SEQ ID NO: 3728 - protein, 4 aa, Artificial sequence
  Synthetic peptide
HPIK

SEQ ID NO: 3729 - protein, 4 aa, Artificial sequence
  Synthetic peptide
PIKH

SEQ ID NO: 3730 - protein, 4 aa, Artificial sequence
  Synthetic peptide
IKHQ

SEQ ID NO: 3731 - protein, 4 aa, Artificial sequence
  Synthetic peptide
KHQG

SEQ ID NO: 3732 - protein, 4 aa, Artificial sequence
  Synthetic peptide
HQGL

SEQ ID NO: 3733 - protein, 4 aa, Artificial sequence
  Synthetic peptide
QGLP

SEQ ID NO: 3734 - protein, 4 aa, Artificial sequence
  Synthetic peptide
GLPQ

SEQ ID NO: 3735 - protein, 4 aa, Artificial sequence
  Synthetic peptide
LPQE

SEQ ID NO: 3736 - protein, 4 aa, Artificial sequence
  Synthetic peptide
PQEV

SEQ ID NO: 3737 - protein, 4 aa, Artificial sequence
  Synthetic peptide
QEVL

SEQ ID NO: 3738 - protein, 4 aa, Artificial sequence
  Synthetic peptide
EVLN

SEQ ID NO: 3739 - protein, 4 aa, Artificial sequence
  Synthetic peptide
VLNE

SEQ ID NO: 3740 - protein, 4 aa, Artificial sequence
  Synthetic peptide
LNEN

SEQ ID NO: 3741 - protein, 4 aa, Artificial sequence
  Synthetic peptide
NENL

SEQ ID NO: 3742 - protein, 4 aa, Artificial sequence
  Synthetic peptide
ENLL

SEQ ID NO: 3743 - protein, 4 aa, Artificial sequence
  Synthetic peptide
NLLR

SEQ ID NO: 3744 - protein, 4 aa, Artificial sequence
  Synthetic peptide
LLRF

SEQ ID NO: 3745 - protein, 4 aa, Artificial sequence
  Synthetic peptide
LRFF

SEQ ID NO: 3746 - protein, 4 aa, Artificial sequence
  Synthetic peptide
RFFV

SEQ ID NO: 3747 - protein, 4 aa, Artificial sequence
  Synthetic peptide
FFVA

SEQ ID NO: 3748 - protein, 5 aa, Artificial sequence
  Synthetic peptide
RPKHP

SEQ ID NO: 3749 - protein, 5 aa, Artificial sequence
  Synthetic peptide
PKHPI

SEQ ID NO: 3750 - protein, 5 aa, Artificial sequence
  Synthetic peptide
KHPIK

SEQ ID NO: 3751 - protein, 5 aa, Artificial sequence
  Synthetic peptide
HPIKH

SEQ ID NO: 3752 - protein, 5 aa, Artificial sequence
  Synthetic peptide
PIKHQ

SEQ ID NO: 3753 - protein, 5 aa, Artificial sequence
  Synthetic peptide
IKHQG

SEQ ID NO: 3754 - protein, 5 aa, Artificial sequence
  Synthetic peptide
KHQGL

SEQ ID NO: 3755 - protein, 5 aa, Artificial sequence
  Synthetic peptide
HQGLP

SEQ ID NO: 3756 - protein, 5 aa, Artificial sequence
  Synthetic peptide
QGLPQ

SEQ ID NO: 3757 - protein, 5 aa, Artificial sequence
  Synthetic peptide
GLPQE

SEQ ID NO: 3758 - protein, 5 aa, Artificial sequence
  Synthetic peptide
LPQEV

SEQ ID NO: 3759 - protein, 5 aa, Artificial sequence
  Synthetic peptide
PQEVL

SEQ ID NO: 3760 - protein, 5 aa, Artificial sequence
  Synthetic peptide
QEVLN

SEQ ID NO: 3761 - protein, 5 aa, Artificial sequence
  Synthetic peptide
EVLNE

SEQ ID NO: 3762 - protein, 5 aa, Artificial sequence
  Synthetic peptide
VLNEN

SEQ ID NO: 3763 - protein, 5 aa, Artificial sequence
  Synthetic peptide
LNENL

SEQ ID NO: 3764 - protein, 5 aa, Artificial sequence
  Synthetic peptide
NENLL

SEQ ID NO: 3765 - protein, 5 aa, Artificial sequence
  Synthetic peptide
ENLLR

SEQ ID NO: 3766 - protein, 5 aa, Artificial sequence
  Synthetic peptide
NLLRF

SEQ ID NO: 3767 - protein, 5 aa, Artificial sequence
  Synthetic peptide
LLRFF

SEQ ID NO: 3768 - protein, 5 aa, Artificial sequence
  Synthetic peptide
LRFFV

SEQ ID NO: 3769 - protein, 5 aa, Artificial sequence
  Synthetic peptide
RFFVA

SEQ ID NO: 3770 - protein, 6 aa, Artificial sequence
  Synthetic peptide
RPKHPI

SEQ ID NO: 3771 - protein, 6 aa, Artificial sequence
  Synthetic peptide
PKHPIK

SEQ ID NO: 3772 - protein, 6 aa, Artificial sequence
  Synthetic peptide
KHPIKH

SEQ ID NO: 3773 - protein, 6 aa, Artificial sequence
  Synthetic peptide
HPIKHQ

SEQ ID NO: 3774 - protein, 6 aa, Artificial sequence
  Synthetic peptide
PIKHQG

SEQ ID NO: 3775 - protein, 6 aa, Artificial sequence
  Synthetic peptide
IKHQGL

SEQ ID NO: 3776 - protein, 6 aa, Artificial sequence
  Synthetic peptide
KHQGLP

SEQ ID NO: 3777 - protein, 6 aa, Artificial sequence
  Synthetic peptide
HQGLPQ

SEQ ID NO: 3778 - protein, 6 aa, Artificial sequence
  Synthetic peptide
QGLPQE

SEQ ID NO: 3779 - protein, 6 aa, Artificial sequence
  Synthetic peptide
GLPQEV

SEQ ID NO: 3780 - protein, 6 aa, Artificial sequence
  Synthetic peptide
LPQEVL

SEQ ID NO: 3781 - protein, 6 aa, Artificial sequence
  Synthetic peptide
PQEVLN

SEQ ID NO: 3782 - protein, 6 aa, Artificial sequence
  Synthetic peptide
QEVLNE

SEQ ID NO: 3783 - protein, 6 aa, Artificial sequence
  Synthetic peptide
EVLNEN

SEQ ID NO: 3784 - protein, 6 aa, Artificial sequence
  Synthetic peptide
VLNENL

SEQ ID NO: 3785 - protein, 6 aa, Artificial sequence
  Synthetic peptide
LNENLL

SEQ ID NO: 3786 - protein, 6 aa, Artificial sequence
  Synthetic peptide
NENLLR

SEQ ID NO: 3787 - protein, 6 aa, Artificial sequence
  Synthetic peptide
ENLLRF

SEQ ID NO: 3788 - protein, 6 aa, Artificial sequence
  Synthetic peptide
NLLRFF

SEQ ID NO: 3789 - protein, 6 aa, Artificial sequence
  Synthetic peptide
LLRFFV

SEQ ID NO: 3790 - protein, 6 aa, Artificial sequence
  Synthetic peptide
LRFFVA

SEQ ID NO: 3791 - protein, 7 aa, Artificial sequence
  Synthetic peptide
RPKHPIK

SEQ ID NO: 3792 - protein, 7 aa, Artificial sequence
  Synthetic peptide
PKHPIKH

SEQ ID NO: 3793 - protein, 7 aa, Artificial sequence
  Synthetic peptide
KHPIKHQ

SEQ ID NO: 3794 - protein, 7 aa, Artificial sequence
  Synthetic peptide
HPIKHQG

SEQ ID NO: 3795 - protein, 7 aa, Artificial sequence
  Synthetic peptide
PIKHQGL

SEQ ID NO: 3796 - protein, 7 aa, Artificial sequence
  Synthetic peptide
IKHQGLP

SEQ ID NO: 3797 - protein, 7 aa, Artificial sequence
  Synthetic peptide
KHQGLPQ

SEQ ID NO: 3798 - protein, 7 aa, Artificial sequence
  Synthetic peptide
HQGLPQE

SEQ ID NO: 3799 - protein, 7 aa, Artificial sequence
  Synthetic peptide
QGLPQEV

SEQ ID NO: 3800 - protein, 7 aa, Artificial sequence
  Synthetic peptide
GLPQEVL

SEQ ID NO: 3801 - protein, 7 aa, Artificial sequence
  Synthetic peptide
LPQEVLN

SEQ ID NO: 3802 - protein, 7 aa, Artificial sequence
  Synthetic peptide
PQEVLNE

SEQ ID NO: 3803 - protein, 7 aa, Artificial sequence
  Synthetic peptide
QEVLNEN

SEQ ID NO: 3804 - protein, 7 aa, Artificial sequence
  Synthetic peptide
EVLNENL

SEQ ID NO: 3805 - protein, 7 aa, Artificial sequence
  Synthetic peptide
VLNENLL

SEQ ID NO: 3806 - protein, 7 aa, Artificial sequence
  Synthetic peptide
LNENLLR

SEQ ID NO: 3807 - protein, 7 aa, Artificial sequence
  Synthetic peptide
NENLLRF

SEQ ID NO: 3808 - protein, 7 aa, Artificial sequence
  Synthetic peptide
ENLLRFF

SEQ ID NO: 3809 - protein, 7 aa, Artificial sequence
  Synthetic peptide
NLLRFFV

SEQ ID NO: 3810 - protein, 7 aa, Artificial sequence
  Synthetic peptide
LLRFFVA

SEQ ID NO: 3811 - protein, 8 aa, Artificial sequence
  Synthetic peptide
RPKHPIKH

SEQ ID NO: 3812 - protein, 8 aa, Artificial sequence
  Synthetic peptide
PKHPIKHQ

SEQ ID NO: 3813 - protein, 8 aa, Artificial sequence
  Synthetic peptide
KHPIKHQG

SEQ ID NO: 3814 - protein, 8 aa, Artificial sequence
  Synthetic peptide
HPIKHQGL

SEQ ID NO: 3815 - protein, 8 aa, Artificial sequence
  Synthetic peptide
PIKHQGLP

SEQ ID NO: 3816 - protein, 8 aa, Artificial sequence
  Synthetic peptide
IKHQGLPQ

SEQ ID NO: 3817 - protein, 8 aa, Artificial sequence
  Synthetic peptide
KHQGLPQE

SEQ ID NO: 3818 - protein, 8 aa, Artificial sequence
  Synthetic peptide
HQGLPQEV

SEQ ID NO: 3819 - protein, 8 aa, Artificial sequence
  Synthetic peptide
QGLPQEVL

SEQ ID NO: 3820 - protein, 8 aa, Artificial sequence
  Synthetic peptide
GLPQEVLN

SEQ ID NO: 3821 - protein, 8 aa, Artificial sequence
  Synthetic peptide
LPQEVLNE

SEQ ID NO: 3822 - protein, 8 aa, Artificial sequence
  Synthetic peptide
PQEVLNEN

SEQ ID NO: 3823 - protein, 8 aa, Artificial sequence
  Synthetic peptide
QEVLNENL

SEQ ID NO: 3824 - protein, 8 aa, Artificial sequence
  Synthetic peptide
EVLNENLL

SEQ ID NO: 3825 - protein, 8 aa, Artificial sequence
  Synthetic peptide
VLNENLLR

SEQ ID NO: 3826 - protein, 8 aa, Artificial sequence
  Synthetic peptide
LNENLLRF

SEQ ID NO: 3827 - protein, 8 aa, Artificial sequence
  Synthetic peptide
NENLLRFF

SEQ ID NO: 3828 - protein, 8 aa, Artificial sequence
  Synthetic peptide
ENLLRFFV

SEQ ID NO: 3829 - protein, 8 aa, Artificial sequence
  Synthetic peptide
NLLRFFVA

SEQ ID NO: 3830 - protein, 9 aa, Artificial sequence
  Synthetic peptide
RPKHPIKHQ

SEQ ID NO: 3831 - protein, 9 aa, Artificial sequence
  Synthetic peptide
PKHPIKHQG

SEQ ID NO: 3832 - protein, 9 aa, Artificial sequence
  Synthetic peptide
KHPIKHQGL

SEQ ID NO: 3833 - protein, 9 aa, Artificial sequence
  Synthetic peptide
HPIKHQGLP

SEQ ID NO: 3834 - protein, 9 aa, Artificial sequence
  Synthetic peptide
PIKHQGLPQ

SEQ ID NO: 3835 - protein, 9 aa, Artificial sequence
  Synthetic peptide
IKHQGLPQE

SEQ ID NO: 3836 - protein, 9 aa, Artificial sequence
  Synthetic peptide
KHQGLPQEV

SEQ ID NO: 3837 - protein, 9 aa, Artificial sequence
  Synthetic peptide
HQGLPQEVL

SEQ ID NO: 3838 - protein, 9 aa, Artificial sequence
  Synthetic peptide
QGLPQEVLN

SEQ ID NO: 3839 - protein, 9 aa, Artificial sequence
  Synthetic peptide
GLPQEVLNE

SEQ ID NO: 3840 - protein, 9 aa, Artificial sequence
  Synthetic peptide
LPQEVLNEN

SEQ ID NO: 3841 - protein, 9 aa, Artificial sequence
  Synthetic peptide
PQEVLNENL

SEQ ID NO: 3842 - protein, 9 aa, Artificial sequence
  Synthetic peptide
QEVLNENLL

SEQ ID NO: 3843 - protein, 9 aa, Artificial sequence
  Synthetic peptide
EVLNENLLR

SEQ ID NO: 3844 - protein, 9 aa, Artificial sequence
  Synthetic peptide
VLNENLLRF

SEQ ID NO: 3845 - protein, 9 aa, Artificial sequence
  Synthetic peptide
LNENLLRFF

SEQ ID NO: 3846 - protein, 9 aa, Artificial sequence
  Synthetic peptide
NENLLRFFV

SEQ ID NO: 3847 - protein, 9 aa, Artificial sequence
  Synthetic peptide
ENLLRFFVA

SEQ ID NO: 3848 - protein, 10 aa, Artificial sequence
  Synthetic peptide
RPKHPIKHQG

SEQ ID NO: 3849 - protein, 10 aa, Artificial sequence
  Synthetic peptide
PKHPIKHQGL

SEQ ID NO: 3850 - protein, 10 aa, Artificial sequence
  Synthetic peptide
KHPIKHQGLP

SEQ ID NO: 3851 - protein, 10 aa, Artificial sequence
  Synthetic peptide
HPIKHQGLPQ

SEQ ID NO: 3852 - protein, 10 aa, Artificial sequence
  Synthetic peptide
PIKHQGLPQE

SEQ ID NO: 3853 - protein, 10 aa, Artificial sequence
  Synthetic peptide
IKHQGLPQEV

SEQ ID NO: 3854 - protein, 10 aa, Artificial sequence
  Synthetic peptide
KHQGLPQEVL

SEQ ID NO: 3855 - protein, 10 aa, Artificial sequence
  Synthetic peptide
HQGLPQEVLN

SEQ ID NO: 3856 - protein, 10 aa, Artificial sequence
  Synthetic peptide
QGLPQEVLNE

SEQ ID NO: 3857 - protein, 10 aa, Artificial sequence
  Synthetic peptide
GLPQEVLNEN

SEQ ID NO: 3858 - protein, 10 aa, Artificial sequence
  Synthetic peptide
LPQEVLNENL

SEQ ID NO: 3859 - protein, 10 aa, Artificial sequence
  Synthetic peptide
PQEVLNENLL

SEQ ID NO: 3860 - protein, 10 aa, Artificial sequence
  Synthetic peptide
QEVLNENLLR

SEQ ID NO: 3861 - protein, 10 aa, Artificial sequence
  Synthetic peptide
EVLNENLLRF

SEQ ID NO: 3862 - protein, 10 aa, Artificial sequence
  Synthetic peptide
VLNENLLRFF

SEQ ID NO: 3863 - protein, 10 aa, Artificial sequence
  Synthetic peptide
LNENLLRFFV

SEQ ID NO: 3864 - protein, 10 aa, Artificial sequence
  Synthetic peptide
NENLLRFFVA

SEQ ID NO: 3865 - protein, 11 aa, Artificial sequence
  Synthetic peptide
RPKHPIKHQGL

SEQ ID NO: 3866 - protein, 11 aa, Artificial sequence
  Synthetic peptide
PKHPIKHQGLP

SEQ ID NO: 3867 - protein, 11 aa, Artificial sequence
  Synthetic peptide
KHPIKHQGLPQ

SEQ ID NO: 3868 - protein, 11 aa, Artificial sequence
  Synthetic peptide
HPIKHQGLPQE

SEQ ID NO: 3869 - protein, 11 aa, Artificial sequence
  Synthetic peptide
PIKHQGLPQEV

SEQ ID NO: 3870 - protein, 11 aa, Artificial sequence
  Synthetic peptide
IKHQGLPQEVL

SEQ ID NO: 3871 - protein, 11 aa, Artificial sequence
  Synthetic peptide
KHQGLPQEVLN

SEQ ID NO: 3872 - protein, 11 aa, Artificial sequence
  Synthetic peptide
HQGLPQEVLNE

SEQ ID NO: 3873 - protein, 11 aa, Artificial sequence
  Synthetic peptide
QGLPQEVLNEN

SEQ ID NO: 3874 - protein, 11 aa, Artificial sequence
  Synthetic peptide
GLPQEVLNENL

SEQ ID NO: 3875 - protein, 11 aa, Artificial sequence
  Synthetic peptide
LPQEVLNENLL

SEQ ID NO: 3876 - protein, 11 aa, Artificial sequence
  Synthetic peptide
PQEVLNENLLR

SEQ ID NO: 3877 - protein, 11 aa, Artificial sequence
  Synthetic peptide
QEVLNENLLRF

SEQ ID NO: 3878 - protein, 11 aa, Artificial sequence
  Synthetic peptide
EVLNENLLRFF

SEQ ID NO: 3879 - protein, 11 aa, Artificial sequence
  Synthetic peptide
VLNENLLRFFV

SEQ ID NO: 3880 - protein, 11 aa, Artificial sequence
  Synthetic peptide
LNENLLRFFVA

SEQ ID NO: 3881 - protein, 12 aa, Artificial sequence
  Synthetic peptide
RPKHPIKHQGLP

SEQ ID NO: 3882 - protein, 12 aa, Artificial sequence
  Synthetic peptide
PKHPIKHQGLPQ

SEQ ID NO: 3883 - protein, 12 aa, Artificial sequence
  Synthetic peptide
KHPIKHQGLPQE

SEQ ID NO: 3884 - protein, 12 aa, Artificial sequence
  Synthetic peptide
HPIKHQGLPQEV

SEQ ID NO: 3885 - protein, 12 aa, Artificial sequence
  Synthetic peptide
PIKHQGLPQEVL

SEQ ID NO: 3886 - protein, 12 aa, Artificial sequence
  Synthetic peptide
IKHQGLPQEVLN

SEQ ID NO: 3887 - protein, 12 aa, Artificial sequence
  Synthetic peptide
KHQGLPQEVLNE

SEQ ID NO: 3888 - protein, 12 aa, Artificial sequence
  Synthetic peptide
HQGLPQEVLNEN

SEQ ID NO: 3889 - protein, 12 aa, Artificial sequence
  Synthetic peptide
QGLPQEVLNENL

SEQ ID NO: 3890 - protein, 12 aa, Artificial sequence
  Synthetic peptide
GLPQEVLNENLL

SEQ ID NO: 3891 - protein, 12 aa, Artificial sequence
  Synthetic peptide
LPQEVLNENLLR

SEQ ID NO: 3892 - protein, 12 aa, Artificial sequence
  Synthetic peptide
PQEVLNENLLRF

SEQ ID NO: 3893 - protein, 12 aa, Artificial sequence
  Synthetic peptide
QEVLNENLLRFF

SEQ ID NO: 3894 - protein, 12 aa, Artificial sequence
  Synthetic peptide
EVLNENLLRFFV

SEQ ID NO: 3895 - protein, 12 aa, Artificial sequence
  Synthetic peptide
VLNENLLRFFVA

SEQ ID NO: 3896 - protein, 13 aa, Artificial sequence
  Synthetic peptide
RPKHPIKHQGLPQ

SEQ ID NO: 3897 - protein, 13 aa, Artificial sequence
  Synthetic peptide
PKHPIKHQGLPQE

SEQ ID NO: 3898 - protein, 13 aa, Artificial sequence
  Synthetic peptide
KHPIKHQGLPQEV

SEQ ID NO: 3899 - protein, 13 aa, Artificial sequence
  Synthetic peptide
HPIKHQGLPQEVL

SEQ ID NO: 3900 - protein, 13 aa, Artificial sequence
  Synthetic peptide
PIKHQGLPQEVLN

SEQ ID NO: 3901 - protein, 13 aa, Artificial sequence
  Synthetic peptide
IKHQGLPQEVLNE

SEQ ID NO: 3902 - protein, 13 aa, Artificial sequence
  Synthetic peptide
KHQGLPQEVLNEN

SEQ ID NO: 3903 - protein, 13 aa, Artificial sequence
  Synthetic peptide
HQGLPQEVLNENL

SEQ ID NO: 3904 - protein, 13 aa, Artificial sequence
  Synthetic peptide
QGLPQEVLNENLL

SEQ ID NO: 3905 - protein, 13 aa, Artificial sequence
  Synthetic peptide
GLPQEVLNENLLR

SEQ ID NO: 3906 - protein, 13 aa, Artificial sequence
  Synthetic peptide
LPQEVLNENLLRF

SEQ ID NO: 3907 - protein, 13 aa, Artificial sequence
  Synthetic peptide
PQEVLNENLLRFF

SEQ ID NO: 3908 - protein, 13 aa, Artificial sequence
  Synthetic peptide
QEVLNENLLRFFV

SEQ ID NO: 3909 - protein, 13 aa, Artificial sequence
  Synthetic peptide
EVLNENLLRFFVA

SEQ ID NO: 3910 - protein, 14 aa, Artificial sequence
  Synthetic peptide
RPKHPIKHQGLPQE

SEQ ID NO: 3911 - protein, 14 aa, Artificial sequence
  Synthetic peptide
PKHPIKHQGLPQEV

SEQ ID NO: 3912 - protein, 14 aa, Artificial sequence
  Synthetic peptide
KHPIKHQGLPQEVL

SEQ ID NO: 3913 - protein, 14 aa, Artificial sequence
  Synthetic peptide
HPIKHQGLPQEVLN

SEQ ID NO: 3914 - protein, 14 aa, Artificial sequence
  Synthetic peptide
PIKHQGLPQEVLNE

SEQ ID NO: 3915 - protein, 14 aa, Artificial sequence
  Synthetic peptide
IKHQGLPQEVLNEN

SEQ ID NO: 3916 - protein, 14 aa, Artificial sequence
  Synthetic peptide
KHQGLPQEVLNENL

SEQ ID NO: 3917 - protein, 14 aa, Artificial sequence
  Synthetic peptide
HQGLPQEVLNENLL

SEQ ID NO: 3918 - protein, 14 aa, Artificial sequence
  Synthetic peptide
QGLPQEVLNENLLR

SEQ ID NO: 3919 - protein, 14 aa, Artificial sequence
  Synthetic peptide
GLPQEVLNENLLRF

SEQ ID NO: 3920 - protein, 14 aa, Artificial sequence
  Synthetic peptide
LPQEVLNENLLRFF

SEQ ID NO: 3921 - protein, 14 aa, Artificial sequence
  Synthetic peptide
PQEVLNENLLRFFV

SEQ ID NO: 3922 - protein, 14 aa, Artificial sequence
  Synthetic peptide
QEVLNENLLRFFVA

SEQ ID NO: 3923 - protein, 15 aa, Artificial sequence
  Synthetic peptide
RPKHPIKHQGLPQEV

SEQ ID NO: 3924 - protein, 15 aa, Artificial sequence
  Synthetic peptide
PKHPIKHQGLPQEVL

SEQ ID NO: 3925 - protein, 15 aa, Artificial sequence
  Synthetic peptide
KHPIKHQGLPQEVLN

SEQ ID NO: 3926 - protein, 15 aa, Artificial sequence
  Synthetic peptide
HPIKHQGLPQEVLNE

SEQ ID NO: 3927 - protein, 15 aa, Artificial sequence
  Synthetic peptide
PIKHQGLPQEVLNEN

SEQ ID NO: 3928 - protein, 15 aa, Artificial sequence
  Synthetic peptide
IKHQGLPQEVLNENL

SEQ ID NO: 3929 - protein, 15 aa, Artificial sequence
  Synthetic peptide
KHQGLPQEVLNENLL

SEQ ID NO: 3930 - protein, 15 aa, Artificial sequence
  Synthetic peptide
HQGLPQEVLNENLLR

SEQ ID NO: 3931 - protein, 15 aa, Artificial sequence
  Synthetic peptide
QGLPQEVLNENLLRF

SEQ ID NO: 3932 - protein, 15 aa, Artificial sequence
  Synthetic peptide
GLPQEVLNENLLRFF

SEQ ID NO: 3933 - protein, 15 aa, Artificial sequence
  Synthetic peptide
LPQEVLNENLLRFFV

SEQ ID NO: 3934 - protein, 15 aa, Artificial sequence
  Synthetic peptide
PQEVLNENLLRFFVA

SEQ ID NO: 3935 - protein, 16 aa, Artificial sequence
  Synthetic peptide
RPKHPIKHQGLPQEVL

SEQ ID NO: 3936 - protein, 16 aa, Artificial sequence
  Synthetic peptide
PKHPIKHQGLPQEVLN

SEQ ID NO: 3937 - protein, 16 aa, Artificial sequence
  Synthetic peptide
KHPIKHQGLPQEVLNE

SEQ ID NO: 3938 - protein, 16 aa, Artificial sequence
  Synthetic peptide
HPIKHQGLPQEVLNEN

SEQ ID NO: 3939 - protein, 16 aa, Artificial sequence
  Synthetic peptide
PIKHQGLPQEVLNENL

SEQ ID NO: 3940 - protein, 16 aa, Artificial sequence
  Synthetic peptide
IKHQGLPQEVLNENLL

SEQ ID NO: 3941 - protein, 16 aa, Artificial sequence
  Synthetic peptide
KHQGLPQEVLNENLLR

SEQ ID NO: 3942 - protein, 16 aa, Artificial sequence
  Synthetic peptide
HQGLPQEVLNENLLRF

SEQ ID NO: 3943 - protein, 16 aa, Artificial sequence
  Synthetic peptide
QGLPQEVLNENLLRFF

SEQ ID NO: 3944 - protein, 16 aa, Artificial sequence
  Synthetic peptide
GLPQEVLNENLLRFFV

SEQ ID NO: 3945 - protein, 16 aa, Artificial sequence
  Synthetic peptide
LPQEVLNENLLRFFVA

SEQ ID NO: 3946 - protein, 17 aa, Artificial sequence
  Synthetic peptide
RPKHPIKHQGLPQEVLN

SEQ ID NO: 3947 - protein, 17 aa, Artificial sequence
  Synthetic peptide
PKHPIKHQGLPQEVLNE

SEQ ID NO: 3948 - protein, 17 aa, Artificial sequence
  Synthetic peptide
KHPIKHQGLPQEVLNEN

SEQ ID NO: 3949 - protein, 17 aa, Artificial sequence
  Synthetic peptide
HPIKHQGLPQEVLNENL

SEQ ID NO: 3950 - protein, 17 aa, Artificial sequence
  Synthetic peptide
PIKHQGLPQEVLNENLL

SEQ ID NO: 3951 - protein, 17 aa, Artificial sequence
  Synthetic peptide
IKHQGLPQEVLNENLLR

SEQ ID NO: 3952 - protein, 17 aa, Artificial sequence
  Synthetic peptide
KHQGLPQEVLNENLLRF

SEQ ID NO: 3953 - protein, 17 aa, Artificial sequence
  Synthetic peptide
HQGLPQEVLNENLLRFF

SEQ ID NO: 3954 - protein, 17 aa, Artificial sequence
  Synthetic peptide
QGLPQEVLNENLLRFFV

SEQ ID NO: 3955 - protein, 17 aa, Artificial sequence
  Synthetic peptide
GLPQEVLNENLLRFFVA

SEQ ID NO: 3956 - protein, 18 aa, Artificial sequence
  Synthetic peptide
RPKHPIKHQGLPQEVLNE

SEQ ID NO: 3957 - protein, 18 aa, Artificial sequence
  Synthetic peptide
PKHPIKHQGLPQEVLNEN

SEQ ID NO: 3958 - protein, 18 aa, Artificial sequence
  Synthetic peptide
KHPIKHQGLPQEVLNENL

SEQ ID NO: 3959 - protein, 18 aa, Artificial sequence
  Synthetic peptide
HPIKHQGLPQEVLNENLL

SEQ ID NO: 3960 - protein, 18 aa, Artificial sequence
  Synthetic peptide
PIKHQGLPQEVLNENLLR

SEQ ID NO: 3961 - protein, 18 aa, Artificial sequence
  Synthetic peptide
IKHQGLPQEVLNENLLRF

SEQ ID NO: 3962 - protein, 18 aa, Artificial sequence
  Synthetic peptide
KHQGLPQEVLNENLLRFF

SEQ ID NO: 3963 - protein, 18 aa, Artificial sequence
  Synthetic peptide
HQGLPQEVLNENLLRFFV

SEQ ID NO: 3964 - protein, 18 aa, Artificial sequence
  Synthetic peptide
QGLPQEVLNENLLRFFVA

SEQ ID NO: 3965 - protein, 19 aa, Artificial sequence
  Synthetic peptide
RPKHPIKHQGLPQEVLNEN

SEQ ID NO: 3966 - protein, 19 aa, Artificial sequence
  Synthetic peptide
PKHPIKHQGLPQEVLNENL

SEQ ID NO: 3967 - protein, 19 aa, Artificial sequence
  Synthetic peptide
KHPIKHQGLPQEVLNENLL

SEQ ID NO: 3968 - protein, 19 aa, Artificial sequence
  Synthetic peptide
HPIKHQGLPQEVLNENLLR

SEQ ID NO: 3969 - protein, 19 aa, Artificial sequence
  Synthetic peptide
PIKHQGLPQEVLNENLLRF

SEQ ID NO: 3970 - protein, 19 aa, Artificial sequence
  Synthetic peptide
IKHQGLPQEVLNENLLRFF

SEQ ID NO: 3971 - protein, 19 aa, Artificial sequence
  Synthetic peptide
KHQGLPQEVLNENLLRFFV

SEQ ID NO: 3972 - protein, 19 aa, Artificial sequence
  Synthetic peptide
HQGLPQEVLNENLLRFFVA

SEQ ID NO: 3973 - protein, 20 aa, Artificial sequence
  Synthetic peptide
RPKHPIKHQGLPQEVLNENL

SEQ ID NO: 3974 - protein, 20 aa, Artificial sequence
  Synthetic peptide
PKHPIKHQGLPQEVLNENLL

SEQ ID NO: 3975 - protein, 20 aa, Artificial sequence
  Synthetic peptide
KHPIKHQGLPQEVLNENLLR

SEQ ID NO: 3976 - protein, 20 aa, Artificial sequence
  Synthetic peptide
HPIKHQGLPQEVLNENLLRF

SEQ ID NO: 3977 - protein, 20 aa, Artificial sequence
  Synthetic peptide
PIKHQGLPQEVLNENLLRFF

SEQ ID NO: 3978 - protein, 20 aa, Artificial sequence
  Synthetic peptide
IKHQGLPQEVLNENLLRFFV

SEQ ID NO: 3979 - protein, 20 aa, Artificial sequence
  Synthetic peptide
KHQGLPQEVLNENLLRFFVA

SEQ ID NO: 3980 - protein, 21 aa, Artificial sequence
  Synthetic peptide
RPKHPIKHQGLPQEVLNENLL

SEQ ID NO: 3981 - protein, 21 aa, Artificial sequence
  Synthetic peptide
PKHPIKHQGLPQEVLNENLLR

SEQ ID NO: 3982 - protein, 21 aa, Artificial sequence
  Synthetic peptide
KHPIKHQGLPQEVLNENLLRF

SEQ ID NO: 3983 - protein, 21 aa, Artificial sequence
  Synthetic peptide
HPIKHQGLPQEVLNENLLRFF

SEQ ID NO: 3984 - protein, 21 aa, Artificial sequence
  Synthetic peptide
PIKHQGLPQEVLNENLLRFFV

SEQ ID NO: 3985 - protein, 21 aa, Artificial sequence
  Synthetic peptide
IKHQGLPQEVLNENLLRFFVA

SEQ ID NO: 3986 - protein, 22 aa, Artificial sequence
  Synthetic peptide
RPKHPIKHQGLPQEVLNENLLR

SEQ ID NO: 3987 - protein, 22 aa, Artificial sequence
  Synthetic peptide
PKHPIKHQGLPQEVLNENLLRF

SEQ ID NO: 3988 - protein, 22 aa, Artificial sequence
  Synthetic peptide
KHPIKHQGLPQEVLNENLLRFF

SEQ ID NO: 3989 - protein, 22 aa, Artificial sequence
  Synthetic peptide
HPIKHQGLPQEVLNENLLRFFV

SEQ ID NO: 3990 - protein, 22 aa, Artificial sequence
  Synthetic peptide
PIKHQGLPQEVLNENLLRFFVA

SEQ ID NO: 3991 - protein, 23 aa, Artificial sequence
  Synthetic peptide
RPKHPIKHQGLPQEVLNENLLRF

SEQ ID NO: 3992 - protein, 23 aa, Artificial sequence
  Synthetic peptide
PKHPIKHQGLPQEVLNENLLRFF

SEQ ID NO: 3993 - protein, 23 aa, Artificial sequence
  Synthetic peptide
KHPIKHQGLPQEVLNENLLRFFV

SEQ ID NO: 3994 - protein, 23 aa, Artificial sequence
  Synthetic peptide
HPIKHQGLPQEVLNENLLRFFVA

SEQ ID NO: 3995 - protein, 24 aa, Artificial sequence
  Synthetic peptide
RPKHPIKHQGLPQEVLNENLLRFF

SEQ ID NO: 3996 - protein, 24 aa, Artificial sequence
  Synthetic peptide
PKHPIKHQGLPQEVLNENLLRFFV

SEQ ID NO: 3997 - protein, 24 aa, Artificial sequence
  Synthetic peptide
KHPIKHQGLPQEVLNENLLRFFVA

SEQ ID NO: 3998 - protein, 25 aa, Artificial sequence
  Synthetic peptide
RPKHPIKHQGLPQEVLNENLLRFFV

SEQ ID NO: 3999 - protein, 25 aa, Artificial sequence
  Synthetic peptide
PKHPIKHQGLPQEVLNENLLRFFVA

SEQ ID NO: 4000 - protein, 26 aa, Artificial sequence
  Synthetic peptide
RPKHPIKHQGLPQEVLNENLLRFFVA

1-190. (canceled)

191. A purified peptide consisting of an amino acid sequence selected from the group consisting of SEQ ID NOs: 25-33.

192. A purified chimeric peptide comprising at least two peptides consisting of an amino acid sequence selected from the group consisting of SEQ ID NOs: 25-33, wherein said peptides are in covalent linkage.

193-221. (canceled)

222. The purified peptide of claim 191, wherein said amino acid sequence is selected from the group consisting of SEQ ID NOs: 25, 28 and 30.

223. The purified peptide of claim 191, wherein said peptide is chemically synthesized.

224. The purified peptide of claim 191, wherein said peptide is recombinantly synthesized.

225. The purified peptide of claim 191, wherein said peptide is provided as a degradation product.

226. The purified peptide of claim 222, wherein said amino acid sequence is SEQ ID NO:25.

227. The purified peptide of claim 222, wherein said amino acid sequence is SEQ ID NO:28.

228. The purified peptide of claim 222, wherein said amino acid sequence is SEQ ID NO:30.

229. The purified peptide of claim 222, wherein said amino acid sequence is SEQ ID NO:28.

230. The purified peptide of claim 192, wherein at least one of said peptides consists of an amino acid sequence selected from the group consisting of SEQ ID NOs: 25, 28 and 30.

231. The purified peptide of claim 230, wherein said amino acid sequence is SEQ ID NO:25.

232. The purified peptide of claim 230, wherein said amino acid sequence is SEQ ID NO:28.

233. The purified peptide of claim 230, wherein said amino acid sequence is SEQ ID NO:30.

234. The purified chimeric peptide of claim 192, comprising at least two peptides selected from the group consisting of SEQ ID NOs: 25, 28 and 30.

235. The purified peptide of claim 192, wherein at least one of said peptides is chemically synthesized.

236. The purified peptide of claim 235, wherein said peptides are chemically synthesized.

237. The purified peptide of claim 192, wherein at least one of said peptides is recombinantly synthesized.

238. The purified peptide of claim 191, wherein at least one said peptides is provided as a degradation product.

239. A purified chimeric peptide consisting of two covalently linked peptides, wherein at least one of said peptides consists of an amino acid selected from the group consisting of SEQ ID NOs: 25-33, and wherein said peptides are chemically synthesized.
